(19) United States
(12) Patent Application Publication
(10) Pub. No.: US 2022/0260570 A1
(43) Pub. Date: Aug. 18, 2022

(54) METHODS AND NUCLEIC ACIDS FOR THE DETECTION OF COLORECTAL CELL PROLIFERATIVE DISORDERS

(71) Applicant: EPIGENOMICS AG, Berlin (DE)

(72) Inventors: Catherine E. Lofton-Day, Seattle, WA (US); Matthias Ebert, München (DE)

(21) Appl. No.: 17/590,200

(22) Filed: Feb. 1, 2022

Related U.S. Application Data
(63) Continuation of application No. 12/297,303, filed on Apr. 22, 2009, now abandoned.
Application No. 12/297,303 is a continuation-in-part of application No. PCT/US2006/014131, filed on Apr. 17, 2006.

(30) Foreign Application Priority Data
Jun. 27, 2006 (EP) 06090119.6

(51) Int. Cl. G01N 33/574; C12Q 1/6886

(52) U.S. Cl. CPC G01N 33/57419; C12Q 2600/112; C12Q 2600/154; C12Q 1/6886

(57) ABSTRACT

The invention provides methods, nucleic acids and kits for detecting, or for distinguishing between or among colorectal cell proliferative disorders. The invention discloses genomic sequences the methylation patterns of which have utility for the improved detection of and differentiation between said class of disorders, thereby enabling the improved diagnosis and treatment of patients.

### FIELD OF THE INVENTION

[0001] The present invention relates to genomic DNA sequences that exhibit altered expression patterns in disease states relative to normal. Particular embodiments provide, inter alia, novel methods, nucleic acids, nucleic acid arrays and kits useful for detecting, or for detecting pre-cancerous colorectal lesions. Preferably, the methods, nucleic acids, nucleic acid arrays and kits for the screening of individuals to identify those at risk of developing colorectal carcinoma.

### BACKGROUND

[0002] Incidence and diagnosis of cancer. Cancer is the second leading cause of death of the United States. Mortality rates could be significantly improved if current screening methods would be improved in terms of patient compliance, sensitivity and ease of screening. Current recommended methods for diagnosis of cancer are often expensive and are not suitable for application as population wide screening tests.

[0003] Hepatocellular cancer (HCC) is the fourth most common cancer in the world, its incidence varies from 2.1 per 100,000 in North America to 80 per 100,000 in China. In the United States, it is estimated that there will be 17,550 new cases diagnosed in 2005 and 15,420 deaths due to this disease. Ultrasound of the liver, alpha fetoprotein levels and conventional CT scan are regularly obtained in the diagnostic evaluation of HCC (hepatocellular cancer or primary liver cancer), but they are often too insensitive to detect multi-focal small lesions and for treatment planning.

[0004] In the United States the annual incidence of colorectal cancer is approximately 150,000, with 56,600 individuals dying form colorectal cancer each year. The lifetime risk of colorectal cancer in the general population is about 5 to 6 percent. Despite intensive efforts in recent years in screening and early detection of colon cancer, until today most cases are diagnosed in an advanced stage with regional or distant metastasis. While the therapeutic options include surgery and adjuvant or palliative chemotherapy, most patients die from progression of their cancer within a few months. Identifying the molecular changes that underlie the development of colon cancer may help to develop new monitoring, screening, diagnostic and therapeutic options that could improve the overall poor prognosis of these patients.

[0005] The current guidelines for colorectal screening according to the American Cancer Society utilizes one of five different options for screening in average risk individuals 50 years of age or older. These options include 1) fecal occult blood test (FOBT) annually, 2) flexible sigmoidoscopy every five years, 3) annual FPBT plus flexible sigmoidoscopy every five years, 4) double contrast barium enema (DCBE) every five years or 5) colonoscopy every ten years. Even though these testing procedures are well accepted by the medical community, the implementation of widespread screening for colorectal cancer has not been realized. Patient compliance is a major factor for limited use due to the discomfort or inconvenience associated with the procedures. FOBT testing, although a non-invasive procedure, requires dietary and other restrictions 3-5 days prior to testing. Sensitivity levels for this test are also very low for colorectal adenocarcinoma with wide variability depending on the trial. Sensitivity measurements for detection of adenomas is even less since most adenomas do not bleed. In contrast, sensitivity for more invasive procedures such as sigmoidoscopy and colonoscopy are quite high because of direct visualization of the lumen of the colon. No randomized trials have evaluated the efficacy of these techniques, however, using data from case-control studies and data from the National Polyp Study (U.S.) it has been shown that removal of adenomatous polyps results in a 76-90% reduction in CRC incidence. Sigmoidoscopy has the limitation of only visualizing the left side of the colon leaving lesions in the right colon undetected. Both scoping procedures are expensive, require cathartic preparation and have increased risk of morbidity and mortality. Improved tests with increased sensitivity, specificity, ease of use and decreased costs are clearly needed before general widespread screening for colorectal cancer becomes routine.

[0006] Early colorectal cancer detection is generally based on the fecal occult blood test (FOBT) performed annually on asymptomatic individuals. Current recommendations adapted by several healthcare organizations, including the American Cancer Society, call for fecal occult blood testing beginning at age 50, repeated annually until such time as the patient would no longer benefit from screening. A positive FOBT leads to colonoscopic examination of the bowel; an expensive and invasive procedure, with a serious complication rate of one per 5,000 examinations. Only 12% of patients with heme positive stool are diagnosed with cancer or large polyps at the time of colonoscopy. A number of studies show that FOBT screening does not improve cancer-related mortality or overall survival. Compliance with occult blood testing has been poor; less than 20 percent of the population is offered or completes FOBT as recommended. If FOBT is properly done, the patient collects a fecal sample from three consecutive bowel movements. Samples are obtained while the patient adheres to dietary guidelines and avoids medications known to induce occult gastrointestinal bleeding. In reality, physicians frequently fail to instruct patients properly, patients frequently fail to adhere to protocol, and some patients find the task of collecting fecal samples difficult or unpleasant, hence compliance with annual occult blood testing is poor. If testing sensitivity and specificity can be improved over current methods, the frequency of testing could be reduced, collection of consecutive samples would be eliminated, dietary and medication schedule modifications would be eliminated, and patient compliance would be enhanced. Compounding the problem of compliance, the sensitivity and specificity of FOBT to detect colon cancer is poor. Poor test specificity leads to unnecessary colonoscopy, adding considerable expense to colon cancer screening.

[0007] Specificity of the FOBT has been calculated at best to be 96%, with a sensitivity of 43% (adenomas) and 50% (colorectal carcinoma). Sensitivity can be improved using an immunoassay FOBT such as that produced under the tradename ‘InSure™’, with an improved sensitivity of 77% (adenomas) and 88.9% (colorectal carcinoma.

[0008] Molecular disease markers. Molecular disease markers offer several advantages over other types of markers, one advantage being that even samples of very small sizes and/or samples whose tissue architecture has not been maintained can be analyzed quite efficiently. Within the last decade a number of genes have been shown to be differentially expressed between normal and colon carcinomas. However, no single or combination of marker has been shown to be sufficient for the diagnosis of colon carcinomas. High-dimensional mRNA based approaches have recently been shown to be able to provide a better means to distinguish between different tumor types and benign and malignant lesions. However its application as a routine diagnostic tool in a clinical environment is impeded by the extreme instability of mRNA, the rapidly occurring expression changes following certain triggers (e.g., sample collection), and, most importantly, the large amount of mRNA needed for analysis (Lipshutz, R. J. et al., Nature Genetics 21:20-24, 1999; Bowtell, D. D. L. Nature genetics suppl. 21:25-32, 1999), which often cannot be obtained from a routine biopsy.

[0009] The use of biological markers to further improve sensitivity and specificity of FOBT has been suggested, examples of such tests include the PreGen-Plus™ stool analysis assay available from EXACT Sciences which has a sensitivity of 20% (adenoma) and 52% (colorectal carcinoma) and a specificity of 95% in both cases. This test assays for the presence of 23 DNA mutations associated with the development of colon neoplasms. The use of DNA methylation as colon cancer markers is known. For example Sabbioni et al. (Molecular Diagnosis 7:201-207, 2003) detected hypermethylation of a panel of genes consisting of TPEF, HICl, DAPK and MGMT in peripheral blood in 98% of colon carcinoma patients. However, this does provide a suitable basis for a commercially marketable test, as the specificity of such a test must also be sufficiently high.

[0010] The current model of colorectal pathogenesis favours a stepwise progression of adenomas, which includes the development of dysplasia and finally signs of invasive cancer. The molecular changes underlying this adenoma-carcinoma sequence include genetic and epigenetic alterations of tumour suppressor genes (APC, p53, DCC), the activation of oncogenes (K-ras) and the inactivation of DNA mismatch repair genes. Recently, further molecular changes and genetic defects have been revealed. Thus, activation of the Wnt signalling pathway not only includes mutations of the APC gene, but may also result from β-catenin mutations. Furthermore, alterations in the TGF-β signalling pathway together with its signal transducers SMAD4 and SMAD2 have been linked to the development of colon cancer.

[0011] Despite recent progress in the understanding of the pathogenesis of adenomas and carcinomas of the colon and their genetic and molecular changes, the genetic and epigenetic changes underlying the development of metastasis are less well understood. It is, however, generally well accepted that the process of invasion and proteolysis of the extracellular matrix, as well as infiltration of the vascular basement membrane involve adhesive proteins, such as members of the family of integrin receptors, the cadherins, the immunoglobulin superfamily, the laminin binding protein and the CD44 receptor. Apart from adhesion, the process of metastasis formation also includes the induction and regulation of angiogenesis (VEGF, bFGF), the induction of cell proliferation (EGF, HGF, IGF) and the activation of proteolytic enzymes (MMPs, TIMPs, uPAR), as well as the inhibition of apoptosis (Bcl-2, Bcl-X). More recently other groups have compared the genetic and molecular changes in metastatic lesions to the changes found in primary colorectal cancers. Thus, Kleeff et al. reported the loss of DOC-2, a candidate tumour suppressor gene, both in primary and metastatic colorectal cancer. Furthermore, Zauber et al. reported that in their series of 42 colorectal cancers Ki-ras mutations in the primary cancers were identical in all of the 42 paired primary and synchronous metastatic lesions. Similarly loss of heterozygosity at the APC locus was identical for 39 paired carcinomas and synchronous metastasis. The authors concluded that for Ki-ras and APC genes the genetic changes in metastasis are identical to the primary colorectal cancer. However, other groups have found genetic and molecular changes in metastatic colon cancers, that are not present in the primary cancers. Thus, the development of LOH of chromosome 3p in colorectal metastasis has been reported. In addition, using comparative genomic hybridization several alterations were found in liver metastasis that were unique to metastastic lesions (-9q, -11q, and -17q).

[0012] CpG island methylation. Apart from mutations aberrant methylation of CpG islands has been shown to lead to the transcriptional silencing of certain genes that have been previously linked to the pathogenesis of various cancers. CpG islands are short sequences which are rich in CpG dinucleotides and can usually be found in the 5′ region of approximately 50% of all human genes. Methylation of the cytosines in these islands leads to the loss of gene expression and has been reported in the inactivation of the X chromosome and genomic imprinting.

[0013] Multifactorial approach. Cancer diagnostics has traditionally relied upon the detection of single molecular markers (e.g., gene mutations, elevated PSA levels). Unfortunately, cancer is a disease state in which single markers have typically failed to detect or differentiate many forms of the disease. Thus, assays that recognize only a single marker have been shown to be of limited predictive value. A fundamental aspect of this invention is that methylation-based cancer diagnostics and the screening, diagnosis, and therapeutic monitoring of such diseases will provide significant improvements over the state-of-the-art that uses single marker analyses by the use of a selection of multiple markers. The multiplexed analytical approach is particularly well suited for cancer diagnostics since cancer is not a simple disease, this multi-factorial “panel” approach is consistent with the heterogeneous nature of cancer, both cytologically and clinically.

[0014] Key to the successful implementation of a panel approach to methylation based diagnostic tests is the design and development of optimized panels of markers that can characterize and distinguish disease states. The present invention describes a plurality of particularly efficient and unique panels of genes, the methylation analysis of one or a combination of the members of the panel enabling the detection of colon cell proliferative disorders with a particularly high sensitivity, specificity and/or predictive value.

[0015] Development of medical tests. Two key evaluative measures of any medical screening or diagnostic test are its sensitivity and specificity, which measure how well the test performs to accurately detect all affected individuals without exception, and without falsely including individuals who do not have the target disease (predictive value). Historically, many diagnostic tests have been criticized due to poor sensitivity and specificity.

[0016] A true positive (TP) result is where the test is positive and the condition is present. A false positive (FP) result is where the test is positive but the condition is not present. A true negative (TN) result is where the test is negative and the condition is not present. A false negative (FN) result is where the test is negative but the condition is not present. In this context: Sensitivity=TP/(TP+FN); Specificity=TN/(FP+TN); and Predictive value=TP/(TP+FP).

[0017] Sensitivity is a measure of a test's ability to correctly detect the target disease in an individual being tested. A test having poor sensitivity produces a high rate of false negatives, i.e., individuals who have the disease but are falsely identified as being free of that particular disease. The potential danger of a false negative is that the diseased individual will remain undiagnosed and untreated for some period of time, during which the disease may progress to a later stage wherein treatments, if any, may be less effective. An example of a test that has low sensitivity is a protein-based blood test for HIV. This type of test exhibits poor sensitivity because it fails to detect the presence of the virus until the disease is well established and the virus has invaded the bloodstream in substantial numbers. In contrast, an example of a test that has high sensitivity is viral-load detection using the polymerase chain reaction (PCR). High sensitivity is achieved because this type of test can detect very small quantities of the virus. High sensitivity is particularly important when the consequences of missing a diagnosis are high.

[0018] Specificity, on the other hand, is a measure of a test's ability to identify accurately patients who are free of the disease state. A test having poor specificity produces a high rate of false positives, i.e., individuals who are falsely identified as having the disease. A drawback of false positives is that they force patients to undergo unnecessary medical procedures treatments with their attendant risks, emotional and financial stresses, and which could have adverse effects on the patient's health. A feature of diseases which makes it difficult to develop diagnostic tests with high specificity is that disease mechanisms, particularly in cancer, often involve a plurality of genes and proteins. Additionally, certain proteins may be elevated for reasons unrelated to a disease state. An example of a test that has high specificity is a gene-based test that can detect a p53 mutation. Specificity is important when the cost or risk associated with further diagnostic procedures or further medical intervention are very high.

[0019] Pronounced need in the art. It is generally accepted that there is a pronounced need in the art for improved screening and early detection of cancers. As an example, if colon cancer screening specificity can be increased, the problem of false positive test results leading to unnecessary colonoscopic examination would be reduced leading to cost savings and improved safety.

[0020] In view of the incidence of cancers in general and more particularly the disadvantages associated with current colorectal cell proliferative disorder screening methods there is a substantial need in the art for improved methods for the early detection of cancer, in particular colon cancer, to be used in addition to or as a substitute for currently available tests.

[0021] Background of the genes of the present invention. The human Septin 9 gene (also known as MLL septin-like fusion protein, MLL septin-like fusion protein MSF-A, Slpa, Eseptin, Msf, septin-like protein Ovarian/Breast septin (Ov/Br septin) and Septin D1) is located on chromosome 17q25 within contig AC068594.15.1.168501 and is a member of the Septin gene family. SEQ ID NO: 1 provides the sequence of said gene, comprising regions of both the Septin 9 and Q9HC74 transcripts and promoter regions.

[0022] It has been postulated that members of the Septin gene family are associated with multiple cellular functions ranging from vesicle transport to cytokinesis. Disruption of the action of Septin 9 results in incomplete cell division, see Surka, M. C., Tsang, C. W., and Trimble, W. S. Mol Biol Cell, 13: 3532-45 (2002). Septin 9 and other proteins have been shown to be fusion partners of the proto-oncogene MLL suggesting a role in tumorigenesis, see Osaka, M, Rowley, J. D. and Zeleznik-Le, N.J. PNAS, 96:6428-6433 (1999). Burrows et al. reported an in depth study of expression of the multiple isoforms of the Septin 9 gene in ovarian cancer and showed tissue specific expression of various transcripts, see Burrows, J. F., Chanduloy, et al. S.E.H. Journal of Pathology, 201:581-588 (2003).

[0023] A recent study of over 7000 normal and tumor tissues indicates that there is consistent over-expression of Septin 9 isoforms in a number of tumor tissues, see Scott, M., Hyland, P. L., et al. Oncogene, 24: 4688-4700 (2005). The authors speculate that the gene is likely a type II cancer gene where changes in RNA transcript processing control regulation of different protein products, and the levels of these altered protein isoforms may provide answers to the gene's role in malignancy.

[0024] The ALX4 gene is a putative transcription factor that belongs to the family of paired-class homeoproteins. This gene is part of a family of genes that includes the mammalian genes Alx3, Cart-1, MHox, and S8 and exhibits similarity to the Drosophila gene aristaless. It binds palindromic DNA sequences (5′-TAAT-3′) as either homodimers or as heterodimers with other family members and strongly activates transcription from a promoter containing the homeodomain binding site, P2. ALX4 is expressed at several sites during development, including the craniofacial and limb-bud mesenchyme. Interestingly, ALX4 deficient mice exhibit body-wall defects, preaxial polydactyly, and a decreased size of the parietal plate of the skull, while mutations of the human homeobox gene ALX4 have been found in inherited defects of skull ossification. ALX4 is also expressed in various tissues whose development is dependent on epithelial-mesenchymal interactions and regulates mesenchymal-specific activities of LEF-1.

[0025] Methylation of the gene ALX4 has been previously disclosed in WO 2004/035803. In said document it was disclosed that ALX4 was methylated accross all classes of colon adenoma and polyp classes, with no differentation between benign, malignant and pre-malignant classes thereof. The subject matter of the present invention differs from that of WO 2004/035803 in that the method of the present invention is practised on body fluid isolated from a subject. The technical effect of practising the method on body fluid samples is that it enables the differentiation between benign and pre-cancerous lesions. Thus the technical problem to be solved by the present invention is how to differentiate between harmless (i.e. benign) and potentially harmful (i.e. those undergoing malignant transformation) colorectal lesions. The person of skill in the art when taking the teachings of WO 2004/035803 into account would not be led to analyse the methylation of said markers in body fluids as opposed to e.g. a histological sample.

### SUMMARY OF THE INVENTION

[0026] The present invention provides a method for determining the presence or absence of pre-cancerous colorectal lesions in a subject comprising determining the expression levels of at least one gene or genomic sequence selected from the group consisting of Septin 9 (including all transcript variants thereof) and ALX4 in a body fluid sample isolated from said subject wherein underexpression and/or CpG methylation is indicative of the presence of said lesions. Alternatively, said invention provides a method for the differentiation of pre-cancerous from benign colorectal lesions. Various aspects of the present invention provide an efficient and unique genetic marker, whereby expression analysis of said marker enables the detection of pre-cancerous lesions with a particularly high sensitivity, specificity and/or predictive value. The inventive testing methods have particular utility for the screening of at-risk populations. The inventive methods have advantages over prior art methods (including the industry standard FOBT) because it enables the detection of colorectal lesions undergoing malignant transformation but prior to the development of cancer. Furthermore the high sensitivity and specificity as well as non-invasiveness of such a test is likely to result in increased patient compliance.

[0027] In one embodiment the invention provides a method for detecting and/or classifying cell proliferative disorders in a subject comprising determining the expression levels of at least one gene or genomic sequence selected from the group consisting of Septin 9 (including all transcript variants thereof) and ALX4 in a body fluid sample isolated from said subject wherein under-expression and/or CpG methylation is indicative of the presence or class of said disorder. In one embodiment said expression level is determined by detecting the presence, absence or level of mRNA transcribed from said gene. In a further embodiment said expression level is determined by detecting the presence, absence or level of a polypeptide encoded by said gene or sequence thereof.

[0028] In a further preferred embodiment said expression is determined by detecting the presence or absence of CpG methylation within said gene(s), wherein the presence of methylation indicates the presence of a cell proliferative lesion undergoing or having already achieved malignant transformation. Said method comprises the following steps: i) contacting genomic DNA isolated from a body fluid sample (preferably selected from the group consisting of blood plasma, blood serum, whole blood, isolated blood cells, cells isolated from the blood) obtained from the subject with at least one reagent, or series of reagents that distinguishes between methylated and non-methylated CpG dinucleotides within at least one target region of the genomic DNA, wherein the nucleotide sequence of said target region comprises at least one CpG dinucleotide sequence of at least one gene or genomic sequence selected from the group consisting of Septin 9 (including all transcript variants thereof) and ALX4; and ii) detecting and/or classifying cell proliferative disorders, at least in part. Preferably the target region comprises, or hybridizes under stringent conditions to a sequence of at least 16 contiguous nucleotides of at least one sequence selected from the group consisting of SEQ ID NO: 1 to SEQ ID NO: 2.

[0029] The method is novel as no methods currently exist that enable the early detection of potentially harmful colorectal lesions. For example, current methods used to detect and diagnose colorectal carcinoma include colonoscopy, sigmoidoscopy, and fecal occult blood colon cancer. In comparison to these methods, the disclosed invention is much less invasive than colonoscopy, and as, if not more sensitive than sigmoidoscopy and FOBT while enabling the detection of harmful lesions before reaching the carcinoma stage. The development of a body fluid assay represents a clear technical advantage over current methods known in the art in that it is anticipated that at least for colorectal carcinoma screening patient compliance for a single body fluid based test will be higher than the triplicate analysis of stool currently recommended for FOBT.

[0030] A particular embodiment of the method comprises the use of at least one gene or genomic sequence selected from the group consisting of Septin 9 (including all transcript variants thereof) and ALX4 as a marker for the detection and/or classification of colorectal cellular proliferative disorders. The present invention is particularly suited for the detection of pre-cancerous colorectal cellular proliferative disorders undergoing malignant transformation. Said use of the gene may be enabled by means of any analysis of the expression of the gene, by means of mRNA expression analysis or protein expression analysis. However, in the most preferred embodiment of the invention, the detection, differentiation and distinguishing of colorectal cell proliferative disorders is enabled by means of analysis of the methylation status of at least one gene or genomic sequence selected from the group consisting of Septin 9 (including all transcript variants thereof) and ALX4 and their promoter or regulatory elements.

[0031] The invention provides a method for the analysis of biological samples for features associated with the development of pre-cancerous cellular proliferative disorders, the method characterized in that at least one nucleic acid, or a fragment thereof, from the group consisting of SEQ ID NO: 1 TO SEQ ID NO: 2 is contacted with a reagent or series of reagents capable of distinguishing between methylated and non methylated CpG dinucleotides within the genomic sequence, or sequences of interest.

[0032] The present invention provides a method for ascertaining epigenetic parameters of genomic DNA associated with the development of malignant colorectal cellular proliferative disorders, the method has utility for the improved diagnosis, treatment and monitoring of said diseases.

[0033] Preferably, the source of the test sample is selected from the group consisting of cells or cell lines, histological slides, biopsies, paraffin-embedded tissue, body fluids, stool, urine, blood, and combinations thereof. More preferably, the source is selected from the group consisting of stool, blood plasma, blood serum, whole blood, isolated blood cells, cells isolated from the blood obtained from the subject.

[0034] Specifically, the present invention provides a method for detecting pre-cancerous colorectal cellular proliferative disorders or for differentiating between pre-cancerous and benign cellular proliferative disorders, comprising: obtaining a body fluid sample comprising genomic nucleic acid(s); contacting the nucleic acid(s), or a fragment thereof, with one reagent or a plurality of reagents sufficient for distinguishing between methylated and non methylated CpG dinucleotide sequences within at least one target sequence of the subject nucleic acid, wherein the target sequence comprises, or hybridises under stringent conditions to, a sequence comprising at least 16 contiguous nucleotides of a sequence selected from the group consisting SEQ ID NO: 1 TO SEQ ID NO: 2, said contiguous nucleotides comprising at least one CpG dinucleotide sequence; and determining, based at least in part on said distinguishing, the methylation state of at least one target CpG dinucleotide sequence, or an average, or a value reflecting an average methylation state of a plurality of target CpG dinucleotide sequences.

[0035] Preferably, distinguishing between methylated and non methylated CpG dinucleotide sequences within the target sequence comprises methylation state-dependent conversion or non-conversion of at least one such CpG dinucleotide sequence to the corresponding converted or non-converted dinucleotide sequence within a sequence selected from the group consisting of SEQ ID NO: 3 to SEQ ID NO: 10, and contiguous regions thereof corresponding to the target sequence.

[0036] Further embodiments provide alternative methods comprising: obtaining a body fluid sample having subject genomic DNA; extracting the genomic DNA; contacting the genomic DNA, or a fragment thereof, comprising one or more sequences selected from the group consisting of SEQ ID NO: 1 to SEQ ID NO: 2 or a sequence that hybridizes under stringent conditions thereto, with one or more methylation-sensitive restriction enzymes, wherein the genomic DNA is either digested thereby to produce digestion fragments, or is not digested thereby; and determining, based on a presence or absence of, or on property of at least one such fragment, the methylation state of at least one CpG dinucleotide sequence of at least one genomic sequence selected form the group consisting of SEQ ID NO: 1 TO SEQ ID NO: 2, or an average, or a value reflecting an average methylation state of a plurality of CpG dinucleotide sequences thereof. Preferably, the digested or undigested genomic DNA is amplified prior to said determining.

[0037] Additional embodiments provide genomic and chemically modified nucleic acid sequences, as well as oligonucleotides and/or PNA-oligomers for analysis of cytosine methylation patterns within sequences from the group consisting of SEQ ID NO: 1 to SEQ ID NO: 2.

### DETAILED DESCRIPTION OF THE INVENTION

### Definitions:

[0038] The term “Observed/Expected Ratio” (“O/E Ratio”) refers to the frequency of CpG dinucleotides within a particular DNA sequence, and corresponds to the [number of CpG sites/(number of C bases x number of G bases)]/band length for each fragment.

[0039] The term “CpG island” refers to a contiguous region of genomic DNA that satisfies the criteria of (1) having a frequency of CpG dinucleotides corresponding to an “Observed/Expected Ratio” >0.6, and (2) having a “GC Content” >0.5. CpG islands are typically, but not always, between about 0.2 to about 1 KB, or to about 2 kb in length.

[0040] The term “methylation state” or “methylation status” refers to the presence or absence of 5-methylcytosine (“5-mCyt”) at one or a plurality of CpG dinucleotides within a DNA sequence. Methylation states at one or more particular CpG methylation sites (each having two CpG dinucleotide sequences) within a DNA sequence include “unmethylated,” “fully-methylated” and “hemi-methylated.”

[0041] The term “hemi-methylation” or “hemimethylation” refers to the methylation state of a double stranded DNA wherein only one strand thereof is methylated.

[0042] The term ‘AUC’ as used herein is an abbreviation for the area under a curve. In particular it refers to the area under a Receiver Operating Characteristic (ROC) curve. The ROC curve is a plot of the true positive rate against the false positive rate for the different possible cut points of a diagnostic test. It shows the trade-off between sensitivity and specificity depending on the selected cut point (any increase in sensitivity will be accompanied by a decrease in specificity). The area under an ROC curve (AUC) is a measure for the accuracy of a diagnostic test (the larger the area the better, optimum is 1, a random test would have a ROC curve lying on the diagonal with an area of 0.5; for reference: J.P. Egan. Signal Detection Theory and ROC Analysis, Academic Press, New York, 1975).

[0043] The term “hypermethylation” refers to the average methylation state corresponding to an increased presence of 5-mCyt at one or a plurality of CpG dinucleotides within a DNA sequence of a test DNA sample, relative to the amount of 5-mCyt found at corresponding CpG dinucleotides within a normal control DNA sample.

[0044] The term “hypomethylation” refers to the average methylation state corresponding to a decreased presence of 5-mCyt at one or a plurality of CpG dinucleotides within a DNA sequence of a test DNA sample, relative to the amount of 5-mCyt found at corresponding CpG dinucleotides within a normal control DNA sample.

[0045] The term “microarray” refers broadly to both “DNA microarrays,” and ‘DNA chip(s),’ as recognized in the art, encompasses all art-recognized solid supports, and encompasses all methods for affixing nucleic acid molecules thereto or synthesis of nucleic acids thereon.

[0046] “Genetic parameters” are mutations and polymorphisms of genes and sequences further required for their regulation. To be designated as mutations are, in particular, insertions, deletions, point mutations, inversions and polymorphisms and, particularly preferred, SNPs (single nucleotide polymorphisms).

[0047] “Epigenetic parameters” are, in particular, cytosine methylation. Further epigenetic parameters include, for example, the acetylation of histones which, however, cannot be directly analysed using the described method but which, in turn, correlate with the DNA methylation.

[0048] The term “bisulfite reagent” refers to a reagent comprising bisulfite, disulfite, hydrogen sulfite or combinations thereof, useful as disclosed herein to distinguish between methylated and unmethylated CpG dinucleotide sequences.

[0049] The term “Methylation assay” refers to any assay for determining the methylation state of one or more CpG dinucleotide sequences within a sequence of DNA.

[0050] The term “MS.AP-PCR” (Methylation-Sensitive Arbitrarily-Primed Polymerase Chain Reaction) refers to the art-recognized technology that allows for a global scan of the genome using CG-rich primers to focus on the regions most likely to contain CpG dinucleotides, and described by Gonzalgo et al., Cancer Research 57:594-599, 1997.

[0051] The term “MethyLight™” refers to the art-recognized fluorescence-based real-time PCR technique described by Eads et al., Cancer Res. 59:2302-2306, 1999.

[0052] The term “HeavyMethyl™” assay, in the embodiment thereof implemented herein, refers to an assay, wherein methylation specific blocking probes (also referred to herein as blockers) covering CpG positions between, or covered by the amplification primers enable methylation-specific selective amplification of a nucleic acid sample.

[0053] The term “HeavyMethyl™ MethyLight™” assay, in the embodiment thereof implemented herein, refers to a HeavyMethyl™ MethyLight™ assay, which is a variation of the MethyLight™ assay, wherein the MethyLight™ assay is combined with methylation specific blocking probes covering CpG positions between the amplification primers.

[0054] The term “Ms-SNuPE” (Methylation-sensitive Single Nucleotide Primer Extension) refers to the art-recognized assay described by Gonzalgo and Jones, Nucleic Acids Res. 25:2529-2531, 1997.

[0055] The term “MSP” (Methylation-specific PCR) refers to the art-recognized methylation assay described by Herman et al. Proc. Natl. Acad. Sci. USA 93:9821-9826, 1996, and by U.S. Pat. No. 5,786,146.

[0056] The term “COBRA” (Combined Bisulfite Restriction Analysis) refers to the art-recognized methylation assay described by Xiong and Laird, Nucleic Acids Res. 25:2532-2534, 1997.

[0057] The term “MCA” (Methylated CpG Island Amplification) refers to the methylation assay described by Toyota et al., Cancer Res. 59:2307-12, 1999, and in WO 00/26401A1.

[0058] The term “hybridization” is to be understood as a bond of an oligonucleotide to a complementary sequence along the lines of the Watson-Crick base pairings in the sample DNA, forming a duplex structure.

[0059] “Stringent hybridization conditions,” as defined herein, involve hybridizing at 68° C. in 5x SSC/5x Denhardt's solution/1.0% SDS, and washing in 0.2x SSC/0.1% SDS at room temperature, or involve the art-recognized equivalent thereof (e.g., conditions in which a hybridization is carried out at 60° C. in 2.5 x SSC buffer, followed by several washing steps at 37° C. in a low buffer concentration, and remains stable). Moderately stringent conditions, as defined herein, involve including washing in 3x SSC at 42° C., or the art-recognized equivalent thereof The parameters of salt concentration and temperature can be varied to achieve the optimal level of identity between the probe and the target nucleic acid. Guidance regarding such conditions is available in the art, for example, by Sambrook et al., 1989, Molecular Cloning, A Laboratory Manual, Cold Spring Harbor Press, N.Y.; and Ausubel et al. (eds.), 1995, Current Protocols in Molecular Biology, (John Wiley and Sons, N.Y.) at Unit 2.10.

[0060] The terms “Methylation-specific restriction enzymes” or “methylation-sensitive restriction enzymes” shall be taken to mean an enzyme that selectively digests a nucleic acid dependant on the methylation state of its recognition site. In the case of such restriction enzymes which specifically cut if the recognition site is not methylated or hemimethylated, the cut will not take place, or with a significantly reduced efficiency, if the recognition site is methylated. In the case of such restriction enzymes which specifically cut if the recognition site is methylated, the cut will not take place, or with a significantly reduced efficiency if the recognition site is not methylated. Preferred are methylation-specific restriction enzymes, the recognition sequence of which contains a CG dinucleotide (for instance cgcg or cccggg). Further preferred for some embodiments are restriction enzymes that do not cut if the cytosine in this dinucleotide is methylated at the carbon atom C5.

[0061] “Non-methylation-specific restriction enzymes” or “non-methylation-sensitive restriction enzymes” are restriction enzymes that cut a nucleic acid sequence irrespective of the methylation state with nearly identical efficiency. They are also called “methylation-unspecific restriction enzymes.”

[0062] The term “gene” shall be taken to include all transcript variants thereof (e.g. the term “Septin 9” shall include for example its truncated transcript Q9HC74) and all promoter and regulatory elements thereof. Furthermore as a plurality of SNPs are known within said gene the term shall be taken to include all sequence variants thereof.

[0063] Colorectal lesions which do not have malignant potential are histologically classified as benign and include hyperplastic polyps, hamartomas and inflammatory polyps. Colorectal lesions which do have malignant potential are histologically classified as neoplastic adenomas and include tubular adenomas (0%-25% villious tissue), tubuvillous adenomas (25%-75% villious tissue) and villous adenomas (75%-100% villious tissue).

[0064] The terms “pre-cancerous” or “pre-malignant” and equivalents thereof shall be taken to mean any cellular proliferative disorder which is undergoing malignant transformation, such as but not limited to neoplastic adenomas including those described above. Examples of such conditions include, in the context of colorectal cellular proliferative disorders, cellular proliferative disorders (such as but not limited to those commonly referred to as “polyps”) with a high degree of dysplasia and the following classes of adenomas:

Level 1: penetration of malignant glands through the muscularis mucosa into the submucosa, within the polyp head;
Level 2: the same submucosal invasion, but present at the junction of the head to the stalk;
Level 3: invasion of the stalk; and
Level 4: invasion of the stalk's base at the connection to the colonic wall (this level corresponds to stage Dukes A).

### Overview:

[0065] The present invention provides a method for detecting pre-cancerous colorectal cell proliferative disorders (e.g. neoplastic adenomas) or for differentiating between benign colorectal lesions and pre-malignant colorectal lesions in a subject comprising determining the expression levels of at least one gene or genomic sequence selected from the group consisting of Septin 9 (including all transcript variants thereof) and ALX4 in a biological sample isolated from said subject wherein underexpression and/or CpG methylation is indicative of the presence of said disorder. Preferably the expression levels of both Septin 9 (including any transcript variants thereof) and ALX4 are analysed. Said markers may be used for the early detection of colorectal cancers during the pre-cancerous stages of the disease both by detecting the presence thereof and/or differentiating between benign and malignant forms of colorectal lesions.

[0066] In a first embodiment the present invention is based upon the analysis of CpG methylation status of at least one gene or genomic sequence selected from the group consisting of Septin 9 (including all transcript variants thereof) and ALX4. Preferably the methylation status of both Septin 9 (including any transcript variants thereof) and ALX4 are analyzed. It is further preferred that the sequences of said genes are as according to TABLE 1.

[0067] Bisulfite modification of DNA is an art-recognized tool used to assess CpG methylation status. 5-methylcytosine is the most frequent covalent base modification in the DNA of eukaryotic cells. It plays a role, for example, in the regulation of the transcription, in genetic imprinting, and in tumorigenesis. Therefore, the identification of 5-methylcytosine as a component of genetic information is of considerable interest. However, 5-methylcytosine positions cannot be identified by sequencing, because 5-methylcytosine has the same base pairing behavior as cytosine. Moreover, the epigenetic information carried by 5-methylcytosine is completely lost during, e.g., PCR amplification.

[0068] The most frequently used method for analyzing DNA for the presence of 5-methylcytosine is based upon the specific reaction of bisulfite with cytosine whereby, upon subsequent alkaline hydrolysis, cytosine is converted to uracil which corresponds to thymine in its base pairing behavior. Significantly, however, 5-methylcytosine remains unmodified under these conditions. Consequently, the original DNA is converted in such a manner that methylcytosine, which originally could not be distinguished from cytosine by its hybridization behavior, can now be detected as the only remaining cytosine using standard, art-recognized molecular biological techniques, for example, by amplification and hybridization, or by sequencing. All of these techniques are based on differential base pairing properties, which can now be fully exploited.

[0069] The prior art, in terms of sensitivity, is defined by a method comprising enclosing the DNA to be analyzed in an agarose matrix, thereby preventing the diffusion and renaturation of the DNA (bisulfite only reacts with single-stranded DNA), and replacing all precipitation and purification steps with fast dialysis (Olek A, et al., A modified and improved method for bisulfite based cytosine methylation analysis, Nucleic Acids Res. 24:5064-6, 1996). It is thus possible to analyze individual cells for methylation status, illustrating the utility and sensitivity of the method. An overview of art-recognized methods for detecting 5-methylcytosine is provided by Rein, T., et al., Nucleic Acids Res., 26:2255, 1998.

[0070] The bisulfite technique, barring few exceptions (e.g., Zeschnigk M, et al., Eur J Hum Genet. 5:94-98, 1997), is currently only used in research. In all instances, short, specific fragments of a known gene are amplified subsequent to a bisulfite treatment, and either completely sequenced (Olek and Walter, Nat Genet. 1997 17:275-6, 1997), subjected to one or more primer extension reactions (Gonzalgo and Jones, Nucleic Acids Res., 25:2529-31, 1997; WO 95/00669; U.S. Pat. No. 6,251,594) to analyze individual cytosine positions, or treated by enzymatic digestion (Xiong and Laird, Nucleic Acids Res., 25:2532-4, 1997). Detection by hybridization has also been described in the art (Olek et al., WO 99/28498). Additionally, use of the bisulfite technique for methylation detection with respect to individual genes has been described (Grigg and Clark, Bioessays, 16:431-6, 1994; Zeschnigk M, et al., Hum Mol Genet., 6:387-95, 1997; Feil R, et al., Nucleic Acids Res., 22:695-, 1994; Martin V, et al., Gene, 157:261-4, 1995; WO 9746705 and WO 9515373).

[0071] The present invention provides for the use of the bisulfite technique, in combination with one or more methylation assays, for determination of the methylation status of CpG dinucleotide sequences within at least one sequence selected from the group consisting SEQ ID NO: 1 TO SEQ ID NO: 2. It is particularly preferred that CpG positions of the gene ALX4 within bases 42,700-52,000 of SEQ ID NO: 1 (or said positions within the equivalent bisulfite converted sequences) are analyzed. It is particularly preferred that CpG positions of the gene Septin 9 within bases 1,000-4,250 or 93,850-96,000 of SEQ ID NO: 2 (or said positions within the equivalent bisulfite converted sequences) are analysed. Genomic CpG dinucleotides can be methylated or unmethylated (alternatively known as up- and down-methylated respectively). However the methods of the present invention are suitable for the analysis of biological samples of a heterogeneous nature, e.g., a low concentration of colorectal cells within a background of blood or stool. Accordingly, when analyzing the methylation status of a CpG position within such a sample the person skilled in the art may use a quantitative assay for determining the level (e.g., percent, fraction, ratio, proportion or degree) of methylation at a particular CpG position as opposed to a methylation state. Accordingly the term methylation status or methylation state should also be taken to mean a value reflecting the degree of methylation at a CpG position. Unless specifically stated the terms “hypermethylated” or “upmethylated” shall be taken to mean a methylation level above that of a specified cut-off point, wherein said cut-off may be a value representing the average or median methylation level for a given population, or is preferably an optimized cut-off level. The “cut-off” is also referred herein as a “threshold”. In the context of the present invention the terms “methylated”, “hypermethylated” or “upmethylated” shall be taken to include a methylation level above the cut-off be zero (0) % (or equivalents thereof) methylation for all CpG positions within and associated with (e.g. in promoter or regulatory regions) the genes selected from the group consisting of Septin 9 (including all transcript variants thereof) and ALX4.

[0072] According to the present invention, determination of the methylation status of CpG dinucleotide sequences within SEQ ID NO: 1 TO SEQ ID NO: 2 has utility in the detection of colorectal lesions undergoing malignant transformation and thus in the early detection of colorectal cancers.

[0073] Methylation Assay Procedures. Various methylation assay procedures are known in the art, and can be used in conjunction with the present invention. These assays allow for determination of the methylation state of one or a plurality of CpG dinucleotides (e.g., CpG islands) within a DNA sequence. Such assays involve, among other techniques, DNA sequencing of bisulfite-treated DNA, PCR (for sequence-specific amplification), Southern blot analysis, and use of methylation-sensitive restriction enzymes.

[0074] For example, genomic sequencing has been simplified for analysis of DNA methylation patterns and 5-methylcytosine distribution by using bisulfite treatment (Frommer et al., Proc. Natl. Acad. Sci. USA 89:1827-1831, 1992). Additionally, restriction enzyme digestion of PCR products amplified from bisulfite-converted DNA is used, e.g., the method described by Sadri and Hornsby (Nucl. Acids Res. 24:5058-5059, 1996), or COBRA (Combined Bisulfite Restriction Analysis) (Xiong and Laird, Nucleic Acids Res. 25:2532-2534, 1997).

[0075] COBRA. COBRA™ analysis is a quantitative methylation assay useful for determining DNA methylation levels at specific gene loci in small amounts of genomic DNA (Xiong and Laird, Nucleic Acids Res. 25:2532-2534, 1997). Briefly, restriction enzyme digestion is used to reveal methylation-dependent sequence differences in PCR products of sodium bisulfite-treated DNA. Methylation-dependent sequence differences are first introduced into the genomic DNA by standard bisulfite treatment according to the procedure described by Frommer et al. (Proc. Natl. Acad. Sci. USA 89:1827-1831, 1992). PCR amplification of the bisulfite converted DNA is then performed using primers specific for the CpG islands of interest, followed by restriction endonuclease digestion, gel electrophoresis, and detection using specific, labeled hybridization probes. Methylation levels in the original DNA sample are represented by the relative amounts of digested and undigested PCR product in a linearly quantitative fashion across a wide spectrum of DNA methylation levels. In addition, this technique can be reliably applied to DNA obtained from micro-dissected paraffin-embedded tissue samples.

[0076] Typical reagents (e.g., as might be found in a typical COBRA™-based kit) for COBRA™ analysis may include, but are not limited to: PCR primers for specific gene (or bisulfite treated DNA sequence or CpG island); restriction enzyme and appropriate buffer; gene-hybridization oligonucleotide; control hybridization oligonucleotide; kinase labeling kit for oligonucleotide probe; and labeled nucleotides. Additionally, bisulfite conversion reagents may include: DNA denaturation buffer; sulfonation buffer; DNA recovery reagents or kits (e.g., precipitation, ultrafiltration, affinity column); desulfonation buffer; and DNA recovery components.

[0077] Preferably, assays such as “MethyLight™” (a fluorescence-based real-time PCR technique) (Eads et al., Cancer Res. 59:2302-2306, 1999), Ms-SNuPE™ (Methylation-sensitive Single Nucleotide Primer Extension) reactions (Gonzalgo and Jones, Nucleic Acids Res. 25:2529-2531, 1997), methylation-specific PCR (“MSP”; Herman et al., Proc. Natl. Acad. Sci. USA 93:9821-9826, 1996; U.S. Pat. No. 5,786,146), and methylated CpG island amplification (“MCA”; Toyota et al., Cancer Res. 59:2307-12, 1999) are used alone or in combination with other of these methods.

[0078] The “HeavyMethyl™” assay, technique is a quantitative method for assessing methylation differences based on methylation specific amplification of bisulfite treated DNA. Methylation specific blocking probes (also referred to herein as blockers) covering CpG positions between, or covered by the amplification primers enable methylation-specific selective amplification of a nucleic acid sample.

[0079] The term “HeavyMethyl™ MethyLight™” assay, in the embodiment thereof implemented herein, refers to a HeavyMethyl™ MethyLight™ assay, which is a variation of the MethyLight™ assay, wherein the MethyLight™ assay is combined with methylation specific blocking probes covering CpG positions between the amplification primers. The HeavyMethyl™ assay may also be used in combination with methylation specific amplification primers.

[0080] Typical reagents (e.g., as might be found in a typical MethyLight□-based kit) for HeavyMethyl™ analysis may include, but are not limited to: PCR primers for specific genes (or bisulfite treated DNA sequence or CpG island); blocking oligonucleotides; optimized PCR buffers and deoxynucleotides; and Taq polymerase.

[0081] MSP. MSP (methylation-specific PCR) allows for assessing the methylation status of virtually any group of CpG sites within a CpG island, independent of the use of methylation-sensitive restriction enzymes (Herman et al. Proc. Natl. Acad. Sci. USA 93:9821-9826, 1996; U.S. Pat. No. 5,786,146). Briefly, DNA is modified by sodium bisulfite converting all unmethylated, but not methylated cytosines to uracil, and subsequently amplified with primers specific for methylated versus unmethylated DNA. MSP requires only small quantities of DNA, is sensitive to 0.1% methylated alleles of a given CpG island locus, and can be performed on DNA extracted from paraffin-embedded samples. Typical reagents (e.g., as might be found in a typical MSP-based kit) for MSP analysis may include, but are not limited to: methylated and unmethylated PCR primers for specific gene (or bisulfite treated DNA sequence or CpG island), optimized PCR buffers and deoxynucleotides, and specific probes.

[0082] MethyLight™. The MethyLight™ assay is a high-throughput quantitative methylation assay that utilizes fluorescence-based real-time PCR (TaqMa®) technology that requires no further manipulations after the PCR step (Eads et al., Cancer Res. 59:2302-2306, 1999). Briefly, the MethyLight™ process begins with a mixed sample of genomic DNA that is converted, in a sodium bisulfite reaction, to a mixed pool of methylation-dependent sequence differences according to standard procedures (the bisulfite process converts unmethylated cytosine residues to uracil). Fluorescence-based PCR is then performed in a “biased” (with PCR primers that overlap known CpG dinucleotides) reaction. Sequence discrimination can occur both at the level of the amplification process and at the level of the fluorescence detection process.

[0083] The MethyLight™ assay may be used as a quantitative test for methylation patterns in the genomic DNA sample, wherein sequence discrimination occurs at the level of probe hybridization. In this quantitative version, the PCR reaction provides for a methylation specific amplification in the presence of a fluorescent probe that overlaps a particular putative methylation site. An unbiased control for the amount of input DNA is provided by a reaction in which neither the primers, nor the probe overlie any CpG dinucleotides. Alternatively, a qualitative test for genomic methylation is achieved by probing of the biased PCR pool with either control oligonucleotides that do not “cover” known methylation sites (a fluorescence-based version of the HeavyMethyl™ and MSP techniques), or with oligonucleotides covering potential methylation sites.

[0084] The MethyLight™ process can by used with any suitable probes e.g. “TaqMan®”, Lightcycler® etc. . . . For example, double-stranded genomic DNA is treated with sodium bisulfite and subjected to one of two sets of PCR reactions using TaqMan® probes; e.g., with MSP primers and/or HeavyMethyl blocker oligonucleotides and TaqMan® probe. The TaqMan® probe is dual-labeled with fluorescent “reporter” and “quencher” molecules, and is designed to be specific for a relatively high GC content region so that it melts out at about 10° C. higher temperature in the PCR cycle than the forward or reverse primers. This allows the TaqMan® probe to remain fully hybridized during the PCR annealing/extension step. As the Taq polymerase enzymatically synthesizes a new strand during PCR, it will eventually reach the annealed TaqMan® probe. The Taq polymerase 5′ to 3′ endonuclease activity will then displace the TaqMan® probe by digesting it to release the fluorescent reporter molecule for quantitative detection of its now unquenched signal using a real-time fluorescent detection system.

[0085] Typical reagents (e.g., as might be found in a typical MethyLight™-based kit) for MethyLight™ analysis may include, but are not limited to: PCR primers for specific gene (or bisulfite treated DNA sequence or CpG island); TaqMan® or Lightcycler® probes; optimized PCR buffers and deoxynucleotides; and Taq polymerase.

[0086] The QM™ (quantitative methylation) assay is an alternative quantitative test for methylation patterns in genomic DNA samples, wherein sequence discrimination occurs at the level of probe hybridization. In this quantitative version, the PCR reaction provides for unbiased amplification in the presence of a fluorescent probe that overlaps a particular putative methylation site. An unbiased control for the amount of input DNA is provided by a reaction in which neither the primers, nor the probe overlie any CpG dinucleotides. Alternatively, a qualitative test for genomic methylation is achieved by probing of the biased PCR pool with either control oligonucleotides that do not “cover” known methylation sites (a fluorescence-based version of the HeavyMethyl™ and MSP techniques), or with oligonucleotides covering potential methylation sites.

[0087] The QM™ process can by used with any suitable probes e.g. “TaqMan®”, Lightcycler® etc. . . . in the amplification process. For example, double-stranded genomic DNA is treated with sodium bisulfite and subjected to unbiased primers and the TaqMan® probe. The TaqMan® probe is dual-labeled with fluorescent “reporter” and “quencher” molecules, and is designed to be specific for a relatively high GC content region so that it melts out at about 10° C. higher temperature in the PCR cycle than the forward or reverse primers. This allows the TaqMan® probe to remain fully hybridized during the PCR annealing/extension step. As the Taq polymerase enzymatically synthesizes a new strand during PCR, it will eventually reach the annealed TaqMan® probe. The Taq polymerase 5′ to 3′ endonuclease activity will then displace the TaqMan® probe by digesting it to release the fluorescent reporter molecule for quantitative detection of its now unquenched signal using a real-time fluorescent detection system. Typical reagents (e.g., as might be found in a typical QM™-based kit) for QM™ analysis may include, but are not limited to: PCR primers for specific gene (or bisulfite treated DNA sequence or CpG island); TaqMan® or Lightcycler® probes; optimized PCR buffers and deoxynucleotides; and Taq polymerase.

[0088] Ms-SNuPE. The Ms-SNuPE™ technique is a quantitative method for assessing methylation differences at specific CpG sites based on bisulfite treatment of DNA, followed by single-nucleotide primer extension (Gonzalgo and Jones, Nucleic Acids Res. 25:2529-2531, 1997). Briefly, genomic DNA is reacted with sodium bisulfite to convert unmethylated cytosine to uracil while leaving 5-methylcytosine unchanged. Amplification of the desired target sequence is then performed using PCR primers specific for bisulfite-converted DNA, and the resulting product is isolated and used as a template for methylation analysis at the CpG site(s) of interest. Small amounts of DNA can be analyzed (e.g., micro-dissected pathology sections), and it avoids utilization of restriction enzymes for determining the methylation status at CpG sites.

[0089] Typical reagents (e.g., as might be found in a typical Ms-SNuPE™-based kit) for Ms-SNuPE™ analysis may include, but are not limited to: PCR primers for specific gene (or bisulfite treated DNA sequence or CpG island); optimized PCR buffers and deoxynucleotides; gel extraction kit; positive control primers; Ms-SNuPE™ primers for specific gene; reaction buffer (for the Ms-SNuPE reaction); and labelled nucleotides. Additionally, bisulfite conversion reagents may include: DNA denaturation buffer; sulfonation buffer; DNA recovery regents or kit (e.g., precipitation, ultrafiltration, affinity column); desulfonation buffer; and DNA recovery components.

[0090] The genomic sequence according to SEQ ID NO: 1 to SEQ ID NO: 2, and non-naturally occurring treated variants thereof according to SEQ ID NO: 3 to SEQ ID NO: 10, were determined to have novel utility for the detection of malignant or pre-malignant colorectal adenomas and the differentiation of benign colorectal lesions from those undergoing malignant transformation and accordingly to be of use in the early detection of colorectal carcinomas.

[0091] In one embodiment the invention of the method comprises the following steps: i) contacting genomic DNA (preferably isolated from body fluids) obtained from the subject with at least one reagent, or series of reagents that distinguishes between methylated and non-methylated CpG dinucleotides within at least one gene or genomic sequence selected from the group consisting of Septin 9 (including all transcript variants thereof) and ALX4 (including their promoter and regulatory regions); and ii) determining the presence or absence of pre-cancerous (i.e. malignant or pre-malignant) colon cellular proliferative disorders or distinguishing between or among benign and pre-cancerous colon cellular proliferative disorders. Preferably the methylation status of both Septin 9 (including any transcript variants thereof) and ALX4 are analyzed.

[0092] Genomic DNA may be isolated by any means standard in the art, including the use of commercially available kits. Briefly, wherein the DNA of interest is encapsulated by a cellular membrane the biological sample must be disrupted and lysed by enzymatic, chemical or mechanical means. The DNA solution may then be cleared of proteins and other contaminants, e.g., by digestion with proteinase K. The genomic DNA is then recovered from the solution. This may be carried out by means of a variety of methods including salting out, organic extraction or binding of the DNA to a solid phase support. The choice of method will be affected by several factors including time, expense and required quantity of DNA. All clinical sample types comprising neoplastic matter are suitable for use in the present method, preferred are cell lines, histological slides, biopsies, paraffin-embedded tissue, body fluids, stool, colonic effluent, urine, blood plasma, blood serum, whole blood, isolated blood cells, cells isolated from the blood and combinations thereof. Body fluids are the preferred source of the DNA; particularly preferred are blood plasma, blood serum, whole blood, isolated blood cells and cells isolated from the blood.

[0093] The genomic DNA sample is then treated with at least one reagent, or series of reagents that distinguishes between methylated and non-methylated CpG dinucleotides within at least one target region of the genomic DNA, wherein the target region comprises, or hybridizes under stringent conditions to a sequence of at least 16 contiguous nucleotides of at least one sequence selected from the group consisting of SEQ ID NO: 1 TO SEQ ID NO: 2 respectively, wherein said contiguous nucleotides comprise at least one CpG dinucleotide sequence.

[0094] It is particularly preferred that said reagent converts cytosine bases which are unmethylated at the 5′-position to uracil, thymine, or another base which is dissimilar to cytosine in terms of hybridization behavior. However in an alternative embodiment said reagent may be a methylation sensitive restriction enzyme.

[0095] Wherein the genomic DNA sample is treated in such a manner that cytosine bases which are unmethylated at the 5′-position are converted to uracil, thymine, or another base which is dissimilar to cytosine in terms of hybridization behavior It is preferred that this treatment is carried out with bisulfite (hydrogen sulfite, disulfite) and subsequent alkaline hydrolysis. Such a treatment results in the conversion of SEQ ID NO: 1 TO SEQ ID NO: 2 to SEQ ID NO: 3-6, (respectively) wherein said CpG dinucleotides are methylated or SEQ ID NO: 7-10 wherein said CpG dinucleotides are unmethylated.

[0096] The treated DNA is then analyzed in order to determine the methylation state of the target gene sequences (at least one gene or genomic sequence selected from the group consisting of SEQ ID NO: 1 to SEQ ID NO: 2). It is particularly preferred that the target region comprises, or hybridizes under stringent conditions to at least 16 contiguous nucleotides of at least one gene or genomic sequence selected from the group consisting of SEQ ID NO: 1 to SEQ ID NO: 2. It is preferred that the sequence of said genes according to SEQ ID NO: 1 to SEQ ID NO: 2 are analyzed. The method of analysis may be selected from those known in the art, including those listed herein. Particularly preferred are MethyLight™, MSP and the use of blocking oligonucleotides (HeavyMethyl™) as described herein. It is further preferred that any oligonucleotides used in such analysis (including primers, blocking oligonucleotides and detection probes) should be reverse complementary, identical, or hybridize under stringent or highly stringent conditions to an at least 16-base-pair long segment of the base sequences of one or more of SEQ ID NO: 3 to SEQ ID NO: 10 and sequences complementary thereto.

[0097] Aberrant methylation, more specifically hypermethylation of the genes and genomic sequences thereof according to Table 1 selected from the group consisting of Septin 9 (including all transcript variants thereof) and/or ALX4 (including their promoter and/or regulatory regions) is associated with the presence of cancer. Preferably the methylation status of both Septin 9 (including any transcript variants thereof) and ALX4 are analyzed. Accordingly wherein a biological sample presents within any degree of methylation, said sample should be determined as having malignant potential.

[0098] The method of the invention may alternatively be enabled by means of any analysis of the expression of an RNA transcribed therefrom or polypeptide or protein translated from said RNA, preferably by means of mRNA expression analysis or polypeptide expression analysis. Accordingly the present invention also provides assays and methods, both quantitative and qualitative for detecting the expression of at least one gene or genomic sequence selected from the group consisting of Septin 9 (including all transcript variants thereof) and/or ALX4 in a subject and determining therefrom upon the presence or absence of a neoplastic colorectal cell proliferative disorder, or differentiating between a malignant or pre-malignant and benign colorectal cell proliferative disorder.

[0099] Aberrant expression of mRNA transcribed from the genes or genomic sequences selected from the group consisting of Septin 9 (including all transcript variants thereof) and/or ALX4 are associated with the malignant transformation of colorectal lesions. Preferably the expression of both Septin 9 (including any transcript variants thereof) and ALX4 are analyzed. According to the present invention, under expression (and/or methylation) is associated with the presence of malignant or pre-malignant colorectal cellular proliferative disorders, and over-expression (and/or absence of methylation) is associated with benign colorectal cellular proliferative disorders. It is particularly preferred that the expression of at least one of the transcript variants of the genes Septin 9 and ALX4 is determined.

[0100] To detect the presence of mRNA encoding a gene or genomic sequence, a sample is obtained from a patient. The sample may be any suitable sample comprising cellular matter of the lesion. Suitable sample types include cell lines, histological slides, biopsies, paraffin-embedded tissue, body fluids, stool, colonic effluent, blood plasma, blood serum, whole blood, isolated blood cells, cells isolated from the blood and all possible combinations thereof. It is preferred that said sample types are stool or body fluids selected from the group consisting colonic effluent, urine, blood plasma, blood serum, whole blood, isolated blood cells, cells isolated from the blood.

[0101] The sample may be treated to extract the RNA contained therein. The resulting nucleic acid from the sample is then analyzed. Many techniques are known in the state of the art for determining absolute and relative levels of gene expression, commonly used techniques suitable for use in the present invention include in situ hybridization (e.g., FISH), Northern analysis, RNase protection assays (RPA), microarrays and PCR-based techniques, such as quantitative PCR and differential display PCR or any other nucleic acid detection method.

[0102] Particularly preferred is the use of the reverse transcription/polymerization chain reaction technique (RT-PCR). The method of RT-PCR is well known in the art (for example, see Watson and Fleming, supra).

[0103] The RT-PCR method can be performed as follows. Total cellular RNA is isolated by, for example, the standard guanidium isothiocyanate method and the total RNA is reverse transcribed. The reverse transcription method involves synthesis of DNA on a template of RNA using a reverse transcriptase enzyme and a 3′ end oligonucleotide dT primer and/or random hexamer primers. The cDNA thus produced is then amplified by means of PCR. (Belyaysky et al, Nucl Acid Res 17:2919-2932, 1989; Krug and Berger, Methods in Enzymology, Academic Press, N.Y., Vol.152, pp. 316-325, 1987 which are incorporated by reference). Further preferred is the “Real-time” variant of RT-PCR, wherein the PCR product is detected by means of hybridization probes (e.g. TaqMan, Lightcycler, Molecular Beacons and Scorpion) or SYBR green. The detected signal from the probes or SYBR green is then quantitated either by reference to a standard curve or by comparing the Ct values to that of a calibration standard. Analysis of housekeeping genes is often used to normalize the results.

[0104] In Northern blot analysis total or poly(A)+mRNA is run on a denaturing agarose gel and detected by hybridisation to a labelled probe in the dried gel itself or on a membrane. The resulting signal is proportional to the amount of target RNA in the RNA population.

[0105] Comparing the signals from two or more cell populations or tissues reveals relative differences in gene expression levels. Absolute quantitation can be performed by comparing the signal to a standard curve generated using known amounts of an in vitro transcript corresponding to the target RNA. Analysis of housekeeping genes, genes whose expression levels are expected to remain relatively constant regardless of conditions, is often used to normalize the results, eliminating any apparent differences caused by unequal transfer of RNA to the membrane or unequal loading of RNA on the gel.

[0106] The first step in Northern analysis is isolating pure, intact RNA from the cells or tissue of interest. Because Northern blots distinguish RNAs by size, sample integrity influences the degree to which a signal is localized in a single band. Partially degraded RNA samples will result in the signal being smeared or distributed over several bands with an overall loss in sensitivity and possibly an erroneous interpretation of the data. In Northern blot analysis, DNA, RNA and oligonucleotide probes can be used and these probes are preferably labelled (e.g., radioactive labels, mass labels or fluorescent labels). The size of the target RNA, not the probe, will determine the size of the detected band, so methods such as random-primed labelling, which generates probes of variable lengths, are suitable for probe synthesis. The specific activity of the probe will determine the level of sensitivity, so it is preferred that probes with high specific activities, are used.

[0107] In an RNase protection assay, the RNA target and an RNA probe of a defined length are hybridised in solution. Following hybridisation, the RNA is digested with RNases specific for single-stranded nucleic acids to remove any unhybridized, single-stranded target RNA and probe. The RNases are inactivated, and the RNA is separated e.g. by denaturing polyacrylamide gel electrophoresis. The amount of intact RNA probe is proportional to the amount of target RNA in the RNA population. RPA can be used for relative and absolute quantitation of gene expression and also for mapping RNA structure, such as intron/exon boundaries and transcription start sites. The RNase protection assay is preferable to Northern blot analysis as it generally has a lower limit of detection.

[0108] The antisense RNA probes used in RPA are generated by in vitro transcription of a DNA template with a defined endpoint and are typically in the range of 50-600 nucleotides. The use of RNA probes that include additional sequences not homologous to the target RNA allows the protected fragment to be distinguished from the fill-length probe. RNA probes are typically used instead of DNA probes due to the ease of generating single-stranded RNA probes and the reproducibility and reliability of RNA:RNA duplex digestion with RNases (Ausubel et al. 2003), particularly preferred are probes with high specific activities.

[0109] Particularly preferred is the use of microarrays. The microarray analysis process can be divided into two main parts. First is the immobilization of known gene sequences onto glass slides or other solid support followed by hybridisation of the fluorescently labelled cDNA (comprising the sequences to be interrogated) to the known genes immobilized on the glass slide (or other solid phase). After hybridisation, arrays are scanned using a fluorescent microarray scanner. Analysing the relative fluorescent intensity of different genes provides a measure of the differences in gene expression.

[0110] DNA arrays can be generated by immobilizing presynthesized oligonucleotides onto prepared glass slides or other solid surfaces. In this case, representative gene sequences are manufactured and prepared using standard oligonucleotide synthesis and purification methods. These synthesized gene sequences are complementary to the RNA transcript(s) of the genes of interest (in this case the genes or genomic sequences selected from the group consisting of Septin 9 (including all transcript variants thereof) and ALX4) and tend to be shorter sequences in the range of 25-70 nucleotides. In a preferred embodiment said oligonucleotides or polynucleotides comprise at least 9, 18 or 25 bases of a sequence complementary to or hybridising to at least the mRNA transcript and sequences complementary thereto. Alternatively, immobilized oligos can be chemically synthesized in situ on the surface of the slide. In situ oligonucleotide synthesis involves the consecutive addition of the appropriate nucleotides to the spots on the microarray; spots not receiving a nucleotide are protected during each stage of the process using physical or virtual masks. Preferably said synthesized nucleic acids are locked nucleic acids.

[0111] In expression profiling microarray experiments, the RNA templates used are representative of the transcription profile of the cells or tissues under study. RNA is first isolated from the cell populations or tissues to be compared. Each RNA sample is then used as a template to generate fluorescently labelled cDNA via a reverse transcription reaction. Fluorescent labelling of the cDNA can be accomplished by either direct labelling or indirect labelling methods. During direct labelling, fluorescently modified nucleotides (e.g., Cy®3- or Cy®5-dCTP) are incorporated directly into the cDNA during the reverse transcription. Alternatively, indirect labelling can be achieved by incorporating aminoallyl-modified nucleotides during cDNA synthesis and then conjugating an N-hydroxysuccinimide (NHS)-ester dye to the aminoallyl-modified cDNA after the reverse transcription reaction is complete. Alternatively, the probe may be unlabelled, but may be detectable by specific binding with a ligand which is labelled, either directly or indirectly. Suitable labels and methods for labelling ligands (and probes) are known in the art, and include, for example, radioactive labels which may be incorporated by known methods (e.g., nick translation or kinasing). Other suitable labels include but are not limited to biotin, fluorescent groups, chemiluminescent groups (e.g., dioxetanes, particularly triggered dioxetanes), enzymes, antibodies, and the like.

[0112] To perform differential gene expression analysis, cDNA generated from different RNA samples are labelled with Cy®3. The resulting labelled cDNA is purified to remove unincorporated nucleotides, free dye and residual RNA. Following purification, the labelled cDNA samples are hybridised to the microarray. The stringency of hybridisation is determined by a number of factors during hybridisation and during the washing procedure, including temperature, ionic strength, length of time and concentration of formamide. These factors are outlined in, for example, Sambrook et al. (Molecular Cloning: A Laboratory Manual, 2nd ed., 1989). The microarray is scanned post-hybridisation using a fluorescent microarray scanner. The fluorescent intensity of each spot indicates the level of expression of the analysed gene; bright spots correspond to strongly expressed genes, while dim spots indicate weak expression.

[0113] Once the images are obtained, the raw data must be analysed. First, the background fluorescence must be subtracted from the fluorescence of each spot. The data is then normalized to a control sequence, such as exogenously added nucleic acids (preferably RNA or DNA), or a housekeeping gene panel to account for any non-specific hybridisation, array imperfections or variability in the array set-up, cDNA labelling, hybridisation or washing. Data normalization allows the results of multiple arrays to be compared.

[0114] Another aspect of the invention relates to a kit for use in the detection of pre-cancerous colorectal cellular proliferative disorders or the differentiation between malignant/pre-malignant and benign colorectal lesions in a subject according to the methods of the present invention, said kit comprising: a means for measuring the level of transcription of genes or genomic sequences selected from the group consisting of Septin 9 (including all transcript variants thereof) and ALX4. In a preferred embodiment the means for measuring the level of transcription comprise oligonucleotides or polynucleotides able to hybridise under stringent or moderately stringent conditions to the transcription products of a gene or genomic sequence selected from the group consisting of Septin 9 (including all transcript variants thereof) and ALX4. Preferably said oligonucleotides or polynucleotides are able to hybridise under stringent or moderately stringent conditions to at least one of the transcription products of a gene or genomic sequence selected from the group consisting of Septin 9 (including all transcript variants thereof) and/or ALX4. In one embodiment said oligonucleotides or polynucleotides comprise at least 9, 18 or 25 bases of a sequence complementary to or hybridising to at least one of said sequence or sequences complementary thereto.

[0115] In a most preferred embodiment the level of transcription is determined by techniques selected from the group of Northern Blot analysis, reverse transcriptase PCR, real-time PCR, RNAse protection, and microarray. In another embodiment of the invention the kit further comprises means for obtaining a biological sample of the patient. Preferred is a kit, which further comprises a container which is most preferably suitable for containing the means for measuring the level of transcription and the biological sample of the patient, and most preferably further comprises instructions for use and interpretation of the kit results.

[0116] In a preferred embodiment the kit comprises (a) a plurality of oligonucleotides or polynucleotides able to hybridise under stringent or moderately stringent conditions to the transcription products of at least one gene or genomic sequence selected from the group consisting of Septin 9 (including all transcript variants thereof) and ALX4; (b) a container, preferably suitable for containing the oligonucleotides or polynucleotides and a biological sample of the patient comprising the transcription products wherein the oligonucleotides or polynucleotides can hybridise under stringent or moderately stringent conditions to the transcription products, (c) means to detect the hybridisation of (b); and optionally, (d) instructions for use and interpretation of the kit results. It is further preferred that said oligonucleotides or polynucleotides of (a) comprise in each case at least 9, 18 or 25 bases of a sequence complementary to or hybridising to the transcription products and sequences complementary thereto.

[0117] The kit may also contain other components such as hybridisation buffer (where the oligonucleotides are to be used as a probe) packaged in a separate container. Alternatively, where the oligonucleotides are to be used to amplify a target region, the kit may contain, packaged in separate containers, a polymerase and a reaction buffer optimised for primer extension mediated by the polymerase, such as PCR. Preferably said polymerase is a reverse transcriptase. It is further preferred that said kit further contains an Rnase reagent.

[0118] The present invention further provides for methods for the detection of the presence of the polypeptide encoded by said gene sequences in a sample obtained from a patient.

[0119] Aberrant levels of polypeptide expression of the polypeptides encoded by the genes or genomic sequences selected from the group consisting of Septin 9 (including all transcript variants thereof) and/or ALX4 are associated with the presence of colorectal cellular proliferative disorders. Furthermore said aberrant levels of expression are of use in the differentiation between benign and malignant/pre-malignant colorectal lesions. According to the present invention, under expression of said polypeptides is associated with the presence of colorectal lesions undergoing malignant transformation.

[0120] Any method known in the art for detecting polypeptides can be used. Such methods include, but are not limited to mass-spectrometry, immunodiffusion, immunoelectrophoresis, immunochemical methods, binder-ligand assays, immunohistochemical techniques, agglutination and complement assays (e.g., see Basic and Clinical Immunology, Sites and Terr, eds., Appleton and Lange, Norwalk, Conn. pp 217-262, 1991 which is incorporated by reference). Preferred are binder-ligand immunoassay methods including reacting antibodies with an epitope or epitopes and competitively displacing a labelled polypeptide or derivative thereof.

[0121] Certain embodiments of the present invention comprise the use of antibodies specific to the polypeptide encoded by a gene or genomic sequence selected from the group consisting of Septin 9 (including all transcript variants thereof) and ALX4.

[0122] Such antibodies are useful for the analysis of colorectal lesions. In certain embodiments production of monoclonal or polyclonal antibodies can be induced by the use of an epitope encoded by a polypeptide of the genes Septin 9 (including all transcript variants thereof) and/or ALX4 as an antigene. Such antibodies may in turn be used to detect expressed polypeptides as markers for the early detection of colorectal cancer. The levels of such polypeptides present may be quantified by conventional methods. Antibody-polypeptide binding may be detected and quantified by a variety of means known in the art, such as labelling with fluorescent or radioactive ligands. The invention further comprises kits for performing the above-mentioned procedures, wherein such kits contain antibodies specific for the investigated polypeptides.

[0123] Numerous competitive and non-competitive polypeptide binding immunoassays are well known in the art. Antibodies employed in such assays may be unlabelled, for example as used in agglutination tests, or labelled for use a wide variety of assay methods. Labels that can be used include radionuclides, enzymes, fluorescers, chemiluminescers, enzyme substrates or co-factors, enzyme inhibitors, particles, dyes and the like. Preferred assays include but are not limited to radioimmunoassay (RIA), enzyme immunoassays, e.g., enzyme-linked immunosorbent assay (ELISA), fluorescent immunoassays and the like. Polyclonal or monoclonal antibodies or epitopes thereof can be made for use in immunoassays by any of a number of methods known in the art.

[0124] In an alternative embodiment of the method the proteins may be detected by means of western blot analysis. Said analysis is standard in the art, briefly proteins are separated by means of electrophoresis, e.g., SDS-PAGE. The separated proteins are then transferred to a suitable membrane (or paper), e.g., nitrocellulose, retaining the spatial separation achieved by electrophoresis. The membrane is then incubated with a blocking agent to bind remaining sticky places on the membrane, commonly used agents include generic protein (e.g., milk protein). An antibody specific to the protein of interest is then added, said antibody being detectably labelled for example by dyes or enzymatic means (e.g., alkaline phosphatase or horseradish peroxidase). The location of the antibody on the membrane is then detected.

[0125] In an alternative embodiment of the method the proteins may be detected by means of immunohistochemistry (the use of antibodies to probe specific antigens in a sample). Said analysis is standard in the art, wherein detection of antigens in tissues is known as immunohistochemistry, while detection in cultured cells is generally termed immunocytochemistry. Briefly, the primary antibody to be detected by binding to its specific antigen. The antibody-antigen complex is then bound by a secondary enzyme conjugated antibody. In the presence of the necessary substrate and chromogen the bound enzyme is detected according to coloured deposits at the antibody-antigen binding sites. There is a wide range of suitable sample types, antigen-antibody affinity, antibody types, and detection enhancement methods. Thus optimal conditions for immunohistochemical or immunocytochemical detection must be determined by the person skilled in the art for each individual case.

[0126] One approach for preparing antibodies to a polypeptide is the selection and preparation of an amino acid sequence of all or part of the polypeptide, chemically synthesising the amino acid sequence and injecting it into an appropriate animal, usually a rabbit or a mouse (Milstein and Kohler Nature 256:495-497, 1975; Gulfre and Milstein, Methods in Enzymology: Immunochemical Techniques 73:1-46, Langone and Banatis eds., Academic Press, 1981 which are incorporated by reference in its entirety). Methods for preparation of the polypeptides or epitopes thereof include, but are not limited to chemical synthesis, recombinant DNA techniques or isolation from biological samples.

[0127] In the final step of the method the diagnosis of the patient is determined, whereby under-expression (of at least one gene or genomic sequence selected from the group consisting of Septin 9 (including all transcript variants thereof) and ALX4) is indicative of the presence of a colorectal lesion undergoing malignant transformation. Preferably the expression of both Septin 9 (including any transcript variants thereof) and ALX4 are analyzed. The term under-expression shall be taken to mean expression at a detected level less than a pre-determined cut off which may be selected from the group consisting of the mean, median or an optimised threshold value.

[0128] Another aspect of the invention provides a kit for use in the early detection of colorectal cancer and/or differentiation between malignant or pre-malignant and benign colorectal lesions in a subject according to the methods of the present invention, comprising: a means for detecting polypeptides at least one gene or genomic sequence selected from the group consisting of Septin 9 (including all transcript variants thereof) and ALX4. The means for detecting the polypeptides comprise preferably antibodies, antibody derivatives, or antibody fragments. The polypeptides are most preferably detected by means of Western Blotting utilizing a labelled antibody. In another embodiment of the invention the kit further comprising means for obtaining a biological sample of the patient. Preferred is a kit, which further comprises a container suitable for containing the means for detecting the polypeptides in the biological sample of the patient, and most preferably further comprises instructions for use and interpretation of the kit results. In a preferred embodiment the kit comprises: (a) a means for detecting polypeptides at least one gene or genomic sequence selected from the group consisting of Septin 9 (including all transcript variants thereof) and ALX4; (b) a container suitable for containing the said means and the biological sample of the patient comprising the polypeptides wherein the means can form complexes with the polypeptides; (c) a means to detect the complexes of (b); and optionally (d) instructions for use and interpretation of the kit results. The kit may also contain other components such as buffers or solutions suitable for blocking, washing or coating, packaged in a separate container.

[0129] Particular embodiments of the present invention provide a novel application of the analysis of methylation levels and/or patterns within said sequences that enables the early detection of colorectal cancers. Early detection of cancer is directly linked with disease prognosis, and the disclosed method thereby enables the physician and patient to make better and more informed treatment decisions.

### Further Improvements

[0130] The present invention provides novel uses for the genomic sequence SEQ ID NO: 1 to SEQ ID NO: 2. Additional embodiments provide modified variants of SEQ ID NO: 1 to SEQ ID NO: 2, as well as oligonucleotides and/or PNA-oligomers for analysis of cytosine methylation patterns within SEQ ID NO: 1 to SEQ ID NO: 2.

[0131] An objective of the invention comprises analysis of the methylation state of one or more CpG dinucleotides within at least one sequence selected form the group consisting of SEQ ID NO: 1 to SEQ ID NO: 2 and sequences complementary thereto.

[0132] The disclosed invention provides treated nucleic acids, derived from genomic SEQ ID NO: 1 to SEQ ID NO: 2, wherein the treatment is suitable to convert at least one unmethylated cytosine base of the genomic DNA sequence to uracil or another base that is detectably dissimilar to cytosine in terms of hybridization. The genomic sequences in question may comprise one, or more consecutive methylated CpG positions. Said treatment preferably comprises use of a reagent selected from the group consisting of bisulfite, hydrogen sulfite, disulfite, and combinations thereof. In a preferred embodiment of the invention, the invention provides a non-naturally occurring modified nucleic acid comprising a sequence of at least 16 contiguous nucleotide bases in length of a sequence selected from the group consisting of SEQ ID NO: 3 to SEQ ID NO: 10. In further preferred embodiments of the invention said nucleic acid is at least 50, 100, 150, 200, 250 or 500 base pairs in length of a segment of the nucleic acid sequence disclosed in SEQ ID NO: 3 to SEQ ID NO: 10. Particularly preferred is a nucleic acid molecule that is not identical or complementary to all or a portion of the sequences SEQ ID NO: 1 to SEQ ID NO: 2 or other naturally occurring DNA.

[0133] It is preferred that said sequence comprises at least one CpG, TpA or CpA dinucleotide and sequences complementary thereto. The sequences of SEQ ID NO: 3 to SEQ ID NO: 10 provide non-naturally occurring modified versions of the nucleic acid according to SEQ ID NO: 1 to SEQ ID NO: 2, wherein the modification of each genomic sequence results in the synthesis of a nucleic acid having a sequence that is unique and distinct from said genomic sequence as follows. For each sense strand genomic DNA, e.g., SEQ ID NO:1, four converted versions are disclosed. A first version wherein “C” is converted to “T,” but “CpG” remains “CpG” (i.e., corresponds to case where, for the genomic sequence, all “C” residues of CpG dinucleotide sequences are methylated and are thus not converted); a second version discloses the complement of the disclosed genomic DNA sequence (i.e. antisense strand), wherein “C” is converted to “T,” but “CpG” remains “CpG” (i.e., corresponds to case where, for all “C” residues of CpG dinucleotide sequences are methylated and are thus not converted). The ‘upmethylated’ converted sequences of SEQ ID NO: 1 to SEQ ID NO: 2 correspond to SEQ ID NO: 3 to 6. A third chemically converted version of each genomic sequences is provided, wherein “C” is converted to “T” for all “C” residues, including those of “CpG” dinucleotide sequences (i.e., corresponds to case where, for the genomic sequences, all “C” residues of CpG dinucleotide sequences are unmethylated); a final chemically converted version of each sequence, discloses the complement of the disclosed genomic DNA sequence (i.e. antisense strand), wherein “C” is converted to “T” for all “C” residues, including those of “CpG” dinucleotide sequences (i.e., corresponds to case where, for the complement (antisense strand) of each genomic sequence, all “C” residues of CpG dinucleotide sequences are unmethylated). The ‘downmethylated’ converted sequences of SEQ ID NO: 1 to SEQ ID NO: 2 correspond to SEQ ID NO: 7 to 10.

[0134] Significantly, heretofore, the nucleic acid sequences and molecules according SEQ ID NO: 3 to SEQ ID NO: 10 were not implicated in or connected with the detection, classification or treatment of cellular proliferative disorders.

[0135] In an alternative preferred embodiment, the invention further provides oligonucleotides or oligomers suitable for use in the methods of the invention for detecting the cytosine methylation state within genomic or treated (chemically modified) DNA, according to SEQ ID NO: 1 to SEQ ID NO: 2, SEQ ID NO: 3 to SEQ ID NO: 10. Said oligonucleotide or oligomer nucleic acids provide novel diagnostic means. Said oligonucleotide or oligomer comprising a nucleic acid sequence having a length of at least nine (9) nucleotides which is identical to, hybridizes, under moderately stringent or stringent conditions (as defined herein above), to a treated nucleic acid sequence according to SEQ ID NO: 3 to SEQ ID NO: 10 and/or sequences complementary thereto, or to a genomic sequence according to SEQ ID NO: 1 to SEQ ID NO: 2, and/or sequences complementary thereto.

[0136] Thus, the present invention includes nucleic acid molecules (e.g., oligonucleotides and peptide nucleic acid (PNA) molecules (PNA-oligomers)) that hybridize under moderately stringent and/or stringent hybridization conditions to all or a portion of a sequence selected form the group consisting of SEQ ID NO: 1 to SEQ ID NO: 2, SEQ ID NO: 3 to SEQ ID NO: 10 or to the complements thereof. Particularly preferred is a nucleic acid molecule that hybridizes under moderately stringent and/or stringent hybridization conditions to all or a portion of the sequences SEQ ID NO: 3 to SEQ ID NO: 10 but not SEQ ID NO: 1 to SEQ ID NO: 2 or other human genomic DNA.

[0137] The identical or hybridizing portion of the hybridizing nucleic acids is typically at least 9, 16, 20, 25, 30 or 35 nucleotides in length. However, longer molecules have inventive utility, and are thus within the scope of the present invention.

[0138] Preferably, the hybridizing portion of the inventive hybridizing nucleic acids is at least 95%, or at least 98%, or 100% identical to the sequence, or to a portion thereof of a sequence selected from the group consisting of SEQ ID NO: 1 to SEQ ID NO: 2, SEQ ID NO: 3 to SEQ ID NO: 10, or to the complements thereof.

[0139] Hybridizing nucleic acids of the type described herein can be used, for example, as a primer (e.g., a PCR primer), or a diagnostic and/or prognostic probe or primer. Preferably, hybridization of the oligonucleotide probe to a nucleic acid sample is performed under stringent conditions and the probe is 100% identical to the target sequence. Nucleic acid duplex or hybrid stability is expressed as the melting temperature or Tm, which is the temperature at which a probe dissociates from a target DNA. This melting temperature is used to define the required stringency conditions.

[0140] For target sequences that are related and substantially identical to the corresponding sequence of SEQ ID NO: 1 to SEQ ID NO: 2 (such as allelic variants and SNPs), rather than identical, it is useful to first establish the lowest temperature at which only homologous hybridization occurs with a particular concentration of salt (e.g., SSC or SSPE). Then, assuming that 1% mismatching results in a 1° C. decrease in the Tm, the temperature of the final wash in the hybridization reaction is reduced accordingly (for example, if sequences having >95% identity with the probe are sought, the final wash temperature is decreased by 5° C.). In practice, the change in Tm can be between 0.5° C. and 1.5° C. per 1% mismatch.

[0141] Examples of inventive oligonucleotides of length X (in nucleotides), as indicated by polynucleotide positions with reference to, e.g., SEQ ID NO:1, include those corresponding to sets (sense and antisense sets) of consecutively overlapping oligonucleotides of length X, where the oligonucleotides within each consecutively overlapping set (corresponding to a given X value) are defined as the finite set of Z oligonucleotides from nucleotide positions:

### n to (n +(X-1));

[0142] where n=1, 2, 3, . . . (Y-(X-1));
where Y equals the length (nucleotides or base pairs) of SEQ ID NO: 1 (52626);
where X equals the common length (in nucleotides) of each oligonucleotide in the set (e.g., X=20 for a set of consecutively overlapping 20-mers); and
where the number (Z) of consecutively overlapping oligomers of length X for a given SEQ ID NO of length Y is equal to Y- (X-1). For example Z=52626-19 =52607 for either sense or antisense sets of SEQ ID NO:1, where X=20.

[0143] Preferably, the set is limited to those oligomers that comprise at least one CpG, TpG or CpA dinucleotide. Examples of inventive 20-mer oligonucleotides include the following set of oligomers (and the antisense set complementary thereto), indicated by polynucleotide positions with reference to SEQ ID NO:1:
[0144] 1-20, 2-21, 3-22, 4-23, 5-24, . . . and 52607-52626.

[0145] Preferably, the set is limited to those oligomers that comprise at least one CpG, TpG or CpA dinucleotide.

[0146] Likewise, examples of inventive 25-mer oligonucleotides include the following set of 219885 oligomers (and the antisense set complementary thereto), indicated by polynucleotide positions with reference to SEQ ID NO: 1:
[0147] 1-25, 2-26, 3-27, 4-28, 5-29, . . . and 52602-52626.

[0148] Preferably, the set is limited to those oligomers that comprise at least one CpG, TpG or CpA dinucleotide.

[0149] The present invention encompasses, for each of SEQ ID NO: 3 to SEQ ID NO: 10, SEQ ID NO: 1 to SEQ ID NO: 2 (sense and antisense), multiple consecutively overlapping sets of oligonucleotides or modified oligonucleotides of length X, where, e.g., X=9, 10, 17, 20, 22, 23, 25, 27, 30 or 35 nucleotides.

[0150] The oligonucleotides or oligomers according to the present invention constitute effective tools useful to ascertain genetic and epigenetic parameters of the genomic sequences selected from the group consisting of SEQ ID NO: 1 to SEQ ID NO: 2. Preferred sets of such oligonucleotides or modified oligonucleotides of length X are those consecutively overlapping sets of oligomers corresponding to SEQ ID NO: 1 to SEQ ID NO: 2, SEQ ID NO: 3 to SEQ ID NO: 10 (and to the complements thereof). Preferably, said oligomers comprise at least one CpG, TpG or CpA dinucleotide.

[0151] Particularly preferred oligonucleotides or oligomers according to the present invention are those in which the cytosine of the CpG dinucleotide (or of the corresponding converted TpG or CpA dinculeotide) sequences is within the middle third of the oligonucleotide; that is, where the oligonucleotide is, for example, 13 bases in length, the CpG, TpG or CpA dinucleotide is positioned within the fifth to ninth nucleotide from the 5′-end.

[0152] The oligonucleotides of the invention can also be modified by chemically linking the oligonucleotide to one or more moieties or conjugates to enhance the activity, stability or detection of the oligonucleotide. Such moieties or conjugates include chromophores, fluorophors, lipids such as cholesterol, cholic acid, thioether, aliphatic chains, phospholipids, polyamines, polyethylene glycol (PEG), palmityl moieties, and others as disclosed in, for example, U.S. Pat. Nos. 5,514,758, 5,565,552, 5,567,810, 5,574,142, 5,585,481, 5,587,371, 5,597,696 and 5,958,773. The probes may also exist in the form of a PNA (peptide nucleic acid) which has particularly preferred pairing properties. Thus, the oligonucleotide may include other appended groups such as peptides, and may include hybridization-triggered cleavage agents (Krol et al., BioTechniques 6:958-976, 1988) or intercalating agents (Zon, Pharm. Res. 5:539-549, 1988). To this end, the oligonucleotide may be conjugated to another molecule, e.g., a chromophore, fluorophor, peptide, hybridization-triggered cross-linking agent, transport agent, hybridization-triggered cleavage agent, etc.

[0153] The oligonucleotide may also comprise at least one art-recognized modified sugar and/or base moiety, or may comprise a modified backbone or non-natural internucleoside linkage.

[0154] The oligonucleotides or oligomers according to particular embodiments of the present invention are typically used in ‘sets,’ which contain at least one oligomer for analysis of each of the CpG dinucleotides of a genomic sequence selected from the group consisting SEQ ID NO: 1 to SEQ ID NO: 2 and sequences complementary thereto, or to the corresponding CpG TpG or CpA dinucleotide within a sequence of the treated nucleic acids according to SEQ ID NO: 3 to SEQ ID NO: 10 and sequences complementary thereto. However, it is anticipated that for economic or other factors it may be preferable to analyse a limited selection of the CpG dinucleotides within said sequences, and the content of the set of oligonucleotides is altered accordingly.

[0155] Therefore, in particular embodiments, the present invention provides a set of at least two (2) (oligonucleotides and/or PNA-oligomers) useful for detecting the cytosine methylation state in treated genomic DNA (SEQ ID NO: 3 to SEQ ID NO: 10), or in genomic DNA (SEQ ID NO: 1 to SEQ ID NO: 2 and sequences complementary thereto). These probes enable the differentiation of pre-cancerous (i.e. malignant or pre-malignant) colorectal lesions from benign colorectal lesions (commonly referred to as benign). The set of oligomers may also be used for detecting single nucleotide polymorphisms (SNPs) in treated genomic DNA (SEQ ID NO: 3 to SEQ ID NO: 10), or in genomic DNA (SEQ ID NO: 1 to SEQ ID NO: 2 and sequences complementary thereto).

[0156] In preferred embodiments, at least one, and more preferably all members of a set of oligonucleotides is bound to a solid phase.

[0157] In further embodiments, the present invention provides a set of at least two (2) oligonucleotides that are used as ‘primer’ oligonucleotides for amplifying DNA sequences of one of SEQ ID NO: 1 to SEQ ID NO: 2, SEQ ID NO: 3 to SEQ ID NO: 10 and sequences complementary thereto, or segments thereof

[0158] It is anticipated that the oligonucleotides may constitute all or part of an “array” or “DNA chip” (i.e., an arrangement of different oligonucleotides and/or PNA-oligomers bound to a solid phase). Such an array of different oligonucleotide- and/or PNA-oligomer sequences can be characterized, for example, in that it is arranged on the solid phase in the form of a rectangular or hexagonal lattice. The solid-phase surface may be composed of silicon, glass, polystyrene, aluminium, steel, iron, copper, nickel, silver, or gold. Nitrocellulose as well as plastics such as nylon, which can exist in the form of pellets or also as resin matrices, may also be used. An overview of the Prior Art in oligomer array manufacturing can be gathered from a special edition of Nature Genetics (Nature Genetics Supplement, Volume 21, January 1999, and from the literature cited therein). Fluorescently labelled probes are often used for the scanning of immobilized DNA arrays. The simple attachment of Cy3 and Cy5 dyes to the 5′—OH of the specific probe are particularly suitable for fluorescence labels. The detection of the fluorescence of the hybridised probes may be carried out, for example, via a confocal microscope. Cy3 and Cy5 dyes, besides many others, are commercially available.

[0159] It is also anticipated that the oligonucleotides, or particular sequences thereof, may constitute all or part of an “virtual array” wherein the oligonucleotides, or particular sequences thereof, are used, for example, as ‘specifiers’ as part of, or in combination with a diverse population of unique labeled probes to analyze a complex mixture of analytes. Such a method, for example is described in US 2003/0013091 (U.S. Ser. No. 09/898,743, published 16 Jan. 2003). In such methods, enough labels are generated so that each nucleic acid in the complex mixture (i.e., each analyte) can be uniquely bound by a unique label and thus detected (each label is directly counted, resulting in a digital read-out of each molecular species in the mixture).

[0160] It is particularly preferred that the oligomers according to the invention are utilized for the early detection of colorectal cancer by differentiating benign colorectal lesions from those undergoing malignant transformation.

[0161] In the most preferred embodiment of the method, the presence or absence of a colon lesion undergoing malignant transformation is determined and/or the differentiation between malignant/pre-malignant and benign lesions is made. This is achieved by analysis of the methylation status of at least one target sequence comprising at least one CpG position said sequence comprising, or hybridizing under stringent conditions to at least 16 contiguous nucleotides of a sequence selected from the group consisting SEQ ID NO: 1 to SEQ ID NO: 2 and complements thereof. The present invention further provides a method for ascertaining genetic and/or epigenetic parameters of the genomic sequence according to SEQ ID NO: 1 to SEQ ID NO: 2 within a subject by analyzing cytosine methylation and single nucleotide polymorphisms. Said method comprising contacting a nucleic acid comprising SEQ ID NO: 1 to SEQ ID NO: 2 in a biological sample obtained from said subject with at least one reagent or a series of reagents, wherein said reagent or series of reagents, distinguishes between methylated and non-methylated CpG dinucleotides within the target nucleic acid.

[0162] In a preferred embodiment, said method comprises the following steps: In the first step, a sample of the tissue to be analyzed is obtained. The source may be any suitable source, such as cell lines, histological slides, biopsies, paraffin-embedded tissue, body fluids, stool, colonic effluent, urine, blood plasma, blood serum, whole blood, isolated blood cells, cells isolated from the blood and all possible combinations thereof It is preferred that said sources of DNA are stool or body fluids selected from the group consisting colonic effluent, blood plasma, blood serum, whole blood, isolated blood cells, cells isolated from the blood.

[0163] The genomic DNA is then isolated from the sample. Genomic DNA may be isolated by any means standard in the art, including the use of commercially available kits. Briefly, wherein the DNA of interest is encapsulated in by a cellular membrane the biological sample must be disrupted and lysed by enzymatic, chemical or mechanical means. The DNA solution may then be cleared of proteins and other contaminants e.g. by digestion with proteinase K. The genomic DNA is then recovered from the solution. This may be carried out by means of a variety of methods including salting out, organic extraction or binding of the DNA to a solid phase support. The choice of method will be affected by several factors including time, expense and required quantity of DNA.

[0164] Wherein the sample DNA is not enclosed in a membrane (e.g. circulating DNA from a blood sample) methods standard in the art for the isolation and/or purification of DNA may be employed. Such methods include the use of a protein degenerating reagent e.g., chaotropic salt e.g. guanidine hydrochloride or urea; or a detergent e.g. sodium dodecyl sulphate (SDS), cyanogen bromide. Alternative methods include but are not limited to ethanol precipitation or propanol precipitation, vacuum concentration amongst others by means of a centrifuge. The person skilled in the art may also make use of devices such as filter devices, e.g., ultrafiltration, silica surfaces or membranes, magnetic particles, polystyrene particles, polystyrene surfaces, positively charged surfaces, and positively charged membranes, charged membranes, charged surfaces, charged switch membranes, charged switched surfaces.

[0165] Once the nucleic acids have been extracted, the genomic double stranded DNA is used in the analysis.

[0166] In the second step of the method, the genomic DNA sample is treated in such a manner that cytosine bases which are unmethylated at the 5′-position are converted to uracil, thymine, or another base which is dissimilar to cytosine in terms of hybridization behavior. This will be understood as ‘pre-treatment’ or ‘treatment’ hereinafter.

[0167] This is preferably achieved by means of treatment with a bisulfite reagent. The term “bisulfite reagent” refers to a reagent comprising bisulfite, disulfite, hydrogen sulfite or combinations thereof, useful as disclosed herein to distinguish between methylated and unmethylated CpG dinucleotide sequences. Methods of said treatment are known in the art (e.g., PCT/EP2004/011715, which is incorporated by reference in its entirety). It is preferred that the bisulfite treatment is conducted in the presence of denaturing solvents such as but not limited to n-alkylenglycol, particularly diethylene glycol dimethyl ether (DME), or in the presence of dioxane or dioxane derivatives. In a preferred embodiment the denaturing solvents are used in concentrations between 1% and 35% (v/v). It is also preferred that the bisulfite reaction is carried out in the presence of scavengers such as but not limited to chromane derivatives, e.g., 6-hydroxy-2, 5, 7, 8, -tetramethylchromane 2-carboxylic acid or trihydroxybenzoe acid and derivates thereof, e.g., Gallic acid (see: PCT/EP2004/011715 which is incorporated by reference in its entirety). The bisulfite conversion is preferably carried out at a reaction temperature between 30° C. and 70° C., whereby the temperature is increased to over 85° C. for short periods of times during the reaction (see: PCT/EP2004/011715 which is incorporated by reference in its entirety). The bisulfite treated DNA is preferably purified priori to the quantification. This may be conducted by any means known in the art, such as but not limited to ultrafiltration, preferably carried out by means of Microcon^™ columns (manufactured by Millipore^™). The purification is carried out according to a modified manufacturer's protocol (see: PCT/EP2004/011715 which is incorporated by reference in its entirety).

[0168] In the third step of the method, fragments of the treated DNA are amplified, using sets of primer oligonucleotides according to the present invention, and an amplification enzyme. The amplification of several DNA segments can be carried out simultaneously in one and the same reaction vessel. Typically, the amplification is carried out using a polymerase chain reaction (PCR). Preferably said amplificates are 100 to 2,000 base pairs in length. The set of primer oligonucleotides includes at least two oligonucleotides whose sequences are each reverse complementary, identical, or hybridise under stringent or highly stringent conditions to an at least 16-base-pair long segment of the base sequences of one of SEQ 1D NO: 3 TO SEQ ID NO: 10 and sequences complementary thereto.

[0169] In an alternate embodiment of the method, the methylation status of pre-selected CpG positions within at least one nucleic acid sequences selected from the group consisting SEQ ID NO: 1 TO SEQ ID NO: 2 may be detected by use of methylation-specific primer oligonucleotides. This technique (MSP) has been described in U.S. Pat. No. 6,265,171 to Herman. The use of methylation status specific primers for the amplification of bisulfite treated DNA allows the differentiation between methylated and unmethylated nucleic acids. MSP primers pairs contain at least one primer which hybridizes to a bisulfite treated CpG dinucleotide. Therefore, the sequence of said primers comprises at least one CpG dinucleotide. MSP primers specific for non-methylated DNA contain a “T” at the position of the C position in the CpG. Preferably, therefore, the base sequence of said primers is required to comprise a sequence having a length of at least 9 nucleotides which hybridizes to a treated nucleic acid sequence according to one of SEQ ID NO: 3 TO SEQ ID NO: 10 and sequences complementary thereto, wherein the base sequence of said oligomers comprises at least one CpG dinucleotide. A further preferred embodiment of the method comprises the use of blocker oligonucleotides (the HeavyMethyl™ assay). The use of such blocker oligonucleotides has been described by Yu et al., BioTechniques 23:714-720, 1997. Blocking probe oligonucleotides are hybridised to the bisulfite treated nucleic acid concurrently with the PCR primers. PCR amplification of the nucleic acid is terminated at the 5′ position of the blocking probe, such that amplification of a nucleic acid is suppressed where the complementary sequence to the blocking probe is present. The probes may be designed to hybridize to the bisulfite treated nucleic acid in a methylation status specific manner. For example, for detection of methylated nucleic acids within a population of unmethylated nucleic acids, suppression of the amplification of nucleic acids which are unmethylated at the position in question would be carried out by the use of blocking probes comprising a ‘CpA’ or ‘TpA’ at the position in question, as opposed to a ‘CpG’ if the suppression of amplification of methylated nucleic acids is desired.

[0170] For PCR methods using blocker oligonucleotides, efficient disruption of polymerase-mediated amplification requires that blocker oligonucleotides not be elongated by the polymerase. Preferably, this is achieved through the use of blockers that are 3′-deoxyoligonucleotides, or oligonucleotides derivitized at the 3′ position with other than a “free” hydroxyl group. For example, 3′-O-acetyl oligonucleotides are representative of a preferred class of blocker molecule.

[0171] Additionally, polymerase-mediated decomposition of the blocker oligonucleotides should be precluded. Preferably, such preclusion comprises either use of a polymerase lacking 5′-3′ exonuclease activity, or use of modified blocker oligonucleotides having, for example, thioate bridges at the 5′-terminii thereof that render the blocker molecule nuclease-resistant. Particular applications may not require such 5′ modifications of the blocker. For example, if the blocker- and primer-binding sites overlap, thereby precluding binding of the primer (e.g., with excess blocker), degradation of the blocker oligonucleotide will be substantially precluded. This is because the polymerase will not extend the primer toward, and through (in the 5′-3′ direction) the blocker—a process that normally results in degradation of the hybridized blocker oligonucleotide.

[0172] A particularly preferred blocker/PCR embodiment, for purposes of the present invention and as implemented herein, comprises the use of peptide nucleic acid (PNA) oligomers as blocking oligonucleotides. Such PNA blocker oligomers are ideally suited, because they are neither decomposed nor extended by the polymerase.

[0173] Preferably, therefore, the base sequence of said blocking oligonucleotides is required to comprise a sequence having a length of at least 9 nucleotides which hybridizes to a treated nucleic acid sequence according to one of SEQ ID NO: 3 to SEQ ID NO: 10 and sequences complementary thereto, wherein the base sequence of said oligonucleotides comprises at least one CpG, TpG or CpA dinucleotide.

[0174] The fragments obtained by means of the amplification can carry a directly or indirectly detectable label. Preferred are labels in the form of fluorescence labels, radionuclides, or detachable molecule fragments having a typical mass which can be detected in a mass spectrometer. Where said labels are mass labels, it is preferred that the labeled amplificates have a single positive or negative net charge, allowing for better delectability in the mass spectrometer. The detection may be carried out and visualized by means of, e.g., matrix assisted laser desorption/ionization mass spectrometry (MALDI) or using electron spray mass spectrometry (ESI).

[0175] Matrix Assisted Laser Desorption/Ionization Mass Spectrometry (MALDI-TOF) is a very efficient development for the analysis of biomolecules (Karas and Hillenkamp, Anal Chem., 60:2299-301, 1988). An analyte is embedded in a light-absorbing matrix. The matrix is evaporated by a short laser pulse thus transporting the analyte molecule into the vapor phase in an unfragmented manner. The analyte is ionized by collisions with matrix molecules. An applied voltage accelerates the ions into a field-free flight tube. Due to their different masses, the ions are accelerated at different rates. Smaller ions reach the detector sooner than bigger ones. MALDI-TOF spectrometry is well suited to the analysis of peptides and proteins. The analysis of nucleic acids is somewhat more difficult (Gut and Beck, Current Innovations and Future Trends, 1:147-57, 1995). The sensitivity with respect to nucleic acid analysis is approximately 100-times less than for peptides, and decreases disproportionally with increasing fragment size. Moreover, for nucleic acids having a multiply negatively charged backbone, the ionization process via the matrix is considerably less efficient. In MALDI-TOF spectrometry, the selection of the matrix plays an eminently important role. For desorption of peptides, several very efficient matrixes have been found which produce a very fine crystallization. There are now several responsive matrixes for DNA, however, the difference in sensitivity between peptides and nucleic acids has not been reduced. This difference in sensitivity can be reduced, however, by chemically modifying the DNA in such a manner that it becomes more similar to a peptide. For example, phosphorothioate nucleic acids, in which the usual phosphates of the backbone are substituted with thiophosphates, can be converted into a charge-neutral DNA using simple alkylation chemistry (Gut and Beck, Nucleic Acids Res. 23: 1367-73, 1995). The coupling of a charge tag to this modified DNA results in an increase in MALDI-TOF sensitivity to the same level as that found for peptides. A further advantage of charge tagging is the increased stability of the analysis against impurities, which makes the detection of unmodified substrates considerably more difficult.

[0176] In the fourth step of the method, the amplificates obtained during the third step of the method are analyzed in order to ascertain the methylation status of the CpG dinucleotides prior to the treatment.

[0177] In embodiments where the amplificates were obtained by means of MSP amplification, the presence or absence of an amplificate is in itself indicative of the methylation state of the CpG positions covered by the primer, according to the base sequences of said primer.

[0178] Amplificates obtained by means of both standard and methylation specific PCR may be further analyzed by means of based-based methods such as, but not limited to, array technology and probe based technologies as well as by means of techniques such as sequencing and template directed extension.

[0179] In one embodiment of the method, the amplificates synthesized in step three are subsequently hybridized to an array or a set of oligonucleotides and/or PNA probes. In this context, the hybridization takes place in the following manner: the set of probes used during the hybridization is preferably composed of at least 2 oligonucleotides or PNA-oligomers; in the process, the amplificates serve as probes which hybridize to oligonucleotides previously bonded to a solid phase; the non-hybridized fragments are subsequently removed; said oligonucleotides contain at least one base sequence having a length of at least 9 nucleotides which is reverse complementary or identical to a segment of the base sequences specified in the present Sequence Listing; and the segment comprises at least one CpG, TpG or CpA dinucleotide. The hybridizing portion of the hybridizing nucleic acids is typically at least 9, 15, 20, 25, 30 or 35 nucleotides in length. However, longer molecules have inventive utility, and are thus within the scope of the present invention.

[0180] In a preferred embodiment, said dinucleotide is present in the central third of the oligomer. For example, wherein the oligomer comprises one CpG dinucleotide, said dinucleotide is preferably the fifth to ninth nucleotide from the 5′-end of a 13-mer. One oligonucleotide exists for the analysis of each CpG dinucleotide within a sequence selected from the group consisting SEQ ID NO: 1 to SEQ ID NO: 2, and the equivalent positions within SEQ ID NO: 3 to SEQ ID NO: 10.

[0181] Said oligonucleotides may also be present in the form of peptide nucleic acids. The non-hybridized amplificates are then removed. The hybridized amplificates are then detected. In this context, it is preferred that labels attached to the amplificates are identifiable at each position of the solid phase at which an oligonucleotide sequence is located.

[0182] In yet a further embodiment of the method, the genomic methylation status of the CpG positions may be ascertained by means of oligonucleotide probes (as detailed above) that are hybridized to the bisulfite treated DNA concurrently with the PCR amplification primers (wherein said primers may either be methylation specific or standard).

[0183] A particularly preferred embodiment of this method is the use of fluorescence-based Real Time Quantitative PCR (Heid et al., Genome Res. 6:986-994, 1996; also see U.S. Pat. No. 6,331,393) employing a dual-labeled fluorescent oligonucleotide probe (TaqMan™ PCR, using an ABI Prism 7700 Sequence Detection System, Perkin Elmer Applied Biosystems, Foster City, Calif.). The TaqMan™ PCR reaction employs the use of a non-extendible interrogating oligonucleotide, called a TaqMan™ probe, which, in preferred embodiments, is designed to hybridize to a CpG-rich sequence located between the forward and reverse amplification primers. The TaqMan™ probe further comprises a fluorescent “reporter moiety” and a “quencher moiety” covalently bound to linker moieties (e.g., phosphoramidites) attached to the nucleotides of the TaqMan™ oligonucleotide. For analysis of methylation within nucleic acids subsequent to bisulfite treatment, it is required that the probe be methylation specific, as described in U.S. Pat. No. 6,331,393, (hereby incorporated by reference in its entirety) also known as the MethyLight™™ assay. Variations on the TaqMan™ detection methodology that are also suitable for use with the described invention include the use of dual-probe technology (Lightcycler™) or fluorescent amplification primers (Sunrise™ technology). Both these techniques may be adapted in a manner suitable for use with bisulfite treated DNA, and moreover for methylation analysis within CpG dinucleotides.

[0184] In a further preferred embodiment of the method, the fourth step of the method comprises the use of template-directed oligonucleotide extension, such as MS-SNuPE as described by Gonzalgo and Jones, Nucleic Acids Res. 25:2529-2531, 1997.

[0185] In yet a further embodiment of the method, the fourth step of the method comprises sequencing and subsequent sequence analysis of the amplificate generated in the third step of the method (Sanger F., et al., Proc Natl Acad Sci USA 74:5463-5467, 1977).

Best mode

[0186] In the most preferred embodiment of the method the genomic nucleic acids are isolated and treated according to the first three steps of the method outlined above, namely:
[0187] a) obtaining, from a subject, a biological sample having subject genomic DNA;
[0188] b) extracting or otherwise isolating the genomic DNA;
[0189] c) treating the genomic DNA of b), or a fragment thereof, with one or more reagents to convert cytosine bases that are unmethylated in the 5-position thereof to uracil or to another base that is detectably dissimilar to cytosine in terms of hybridization properties; and wherein
[0190] d) amplifying subsequent to treatment in c) is carried out in a methylation specific manner, namely by use of methylation specific primers or blocking oligonucleotides, and further wherein
[0191] e) detecting of the amplificates is carried out by means of a real-time detection probe, as described above.

[0192] Preferably, where the subsequent amplification of d) is carried out by means of methylation specific primers, as described above, said methylation specific primers comprise a sequence having a length of at least 9 nucleotides which hybridizes to a treated nucleic acid sequence according to one of SEQ ID NO: 3 to SEQ ID NO: 10 and sequences complementary thereto, wherein the base sequence of said oligomers comprise at least one CpG dinucleotide.

[0193] Step e) of the method, namely the detection of the specific amplificates indicative of the methylation status of one or more CpG positions of at least one sequences of the group comprising SEQ ID NO: 1 to SEQ ID NO: 2 is carried out by means of real-time detection methods as described above.

[0194] Additional embodiments of the invention provide a method for the analysis of the methylation status of genomic DNA according to the invention (SEQ ID NO: 1 to SEQ ID NO: 2, and complements thereof) without the need for bisulfite conversion. Methods are known in the art wherein a methylation sensitive restriction enzyme reagent, or a series of restriction enzyme reagents comprising methylation sensitive restriction enzyme reagents that distinguishes between methylated and non-methylated CpG dinucleotides within a target region are utilized in determining methylation, for example but not limited to DMH.

[0195] In the first step of such additional embodiments, the genomic DNA sample is isolated from tissue or cellular sources. Genomic DNA may be isolated by any means standard in the art, including the use of commercially available kits. Briefly, wherein the DNA of interest is encapsulated in by a cellular membrane the biological sample must be disrupted and lysed by enzymatic, chemical or mechanical means. The DNA solution may then be cleared of proteins and other contaminants, e.g., by digestion with proteinase K. The genomic DNA is then recovered from the solution. This may be carried out by means of a variety of methods including salting out, organic extraction or binding of the DNA to a solid phase support. The choice of method will be affected by several factors including time, expense and required quantity of DNA. All clinical sample types comprising neoplastic or potentially neoplastic matter are suitable for use in the present method, preferred are cell lines, histological slides, biopsies, paraffin-embedded tissue, body fluids, stool, colonic effluent, urine, blood plasma, blood serum, whole blood, isolated blood cells, cells isolated from the blood and combinations thereof. Body fluids are the preferred source of the DNA; particularly preferred are blood plasma, blood serum, whole blood, isolated blood cells and cells isolated from the blood.

[0196] Once the nucleic acids have been extracted, the genomic double-stranded DNA is used in the analysis.

[0197] In a preferred embodiment, the DNA may be cleaved prior to treatment with methylation sensitive restriction enzymes. Such methods are known in the art and may include both physical and enzymatic means. Particularly preferred is the use of one or a plurality of restriction enzymes which are not methylation sensitive, and whose recognition sites are AT rich and do not comprise CG dinucleotides. The use of such enzymes enables the conservation of CpG islands and CpG rich regions in the fragmented DNA. The non-methylation-specific restriction enzymes are preferably selected from the group consisting of MseI, BfaI, Csp6I, TruII, TvuII, Tru9I, Tvu9I, MaeI and XspI. Particularly preferred is the use of two or three such enzymes. Particularly preferred is the use of a combination of MseI, BfaI and Csp6I.

[0198] The fragmented DNA may then be ligated to adaptor oligonucleotides in order to facilitate subsequent enzymatic amplification. The ligation of oligonucleotides to blunt and sticky ended DNA fragments is known in the art, and is carried out by means of dephosphorylation of the ends (e.g. using calf or shrimp alkaline phosphatase) and subsequent ligation using ligase enzymes (e.g. T4 DNA ligase) in the presence of dATPs. The adaptor oligonucleotides are typically at least 18 base pairs in length.

[0199] In the third step, the DNA (or fragments thereof) is then digested with one or more methylation sensitive restriction enzymes. The digestion is carried out such that hydrolysis of the DNA at the restriction site is informative of the methylation status of a specific CpG dinucleotide of at least one gene or genomic sequence selected from the group consisting of Septin 9 (including all transcript variants thereof) and ALX4. Preferably the methylation status of both Septin 9 (including any transcript variants thereof) and ALX4 are analyzed.

[0200] Preferably, the methylation-specific restriction enzyme is selected from the group consisting of Bsi E1, Hga I HinPl, Hpy99I, Ava I, Bce AI, Bsa HI, BisI, BstUI, BshI236I, AccII, BstFNI, McrBC, GlaI, MvnI, HpaII (HapII), HhaI, AciI, SmaI, HinPII, HpyCH4IV, EagI and mixtures of two or more of the above enzymes. Preferred is a mixture containing the restriction enzymes BstUI, HpaII, HpyCH4IV and HinPII.

[0201] In the fourth step, which is optional but a preferred embodiment, the restriction fragments are amplified. This is preferably carried out using a polymerase chain reaction, and said amplificates may carry suitable detectable labels as discussed above, namely fluorophore labels, radionuclides and mass labels. Particularly preferred is amplification by means of an amplification enzyme and at least two primers comprising, in each case a contiguous sequence at least 16 nucleotides in length that is complementary to, or hybridizes under moderately stringent or stringent conditions to a sequence selected from the group consisting SEQ ID NO: 1 TO SEQ ID NO: 2, and complements thereof. Preferably said contiguous sequence is at least 16, 20 or 25 nucleotides in length. In an alternative embodiment said primers may be complementary to any adaptors linked to the fragments.

[0202] In the fifth step the amplificates are detected. The detection may be by any means standard in the art, for example, but not limited to, gel electrophoresis analysis, hybridization analysis, incorporation of detectable tags within the PCR products, DNA array analysis, MALDI or ESI analysis. Preferably said detection is carried out by hybridization to at least one nucleic acid or peptide nucleic acid comprising in each case a contiguous sequence at least 16 nucleotides in length that is complementary to, or hybridizes under moderately stringent or stringent conditions to a sequence selected from the group consisting SEQ ID NO: 1 to SEQ ID NO: 2, and complements thereof. Preferably said contiguous sequence is at least 16, 20 or 25 nucleotides in length.

[0203] Subsequent to the determination of the methylation state or level of the genomic nucleic acids the class of cellular proliferative disorder (benign or malignant) is deduced based upon the methylation state or level of at least one CpG dinucleotide sequence of at least one sequence selected from the group consisting SEQ ID NO: 1 to SEQ ID NO: 2, or an average, or a value reflecting an average methylation state of a plurality of CpG dinucleotide sequences of at least one sequence selected from the group consisting SEQ ID NO: 1 to SEQ ID NO: 2 wherein methylation is associated with a colorectal lesion undergoing malignant transformation. Wherein said methylation is determined by quantitative means the cut-off point for determining said the presence of methylation is preferably zero (i.e. wherein a sample displays any degree of methylation it is determined as having a methylated status at the analyzed CpG position). Nonetheless, it is foreseen that the person skilled in the art may wish to adjust said cut-off value in order to provide an assay of a particularly preferred sensitivity or specificity. Accordingly said cut-off value may be increased (thus increasing the specificity), said cut off value may be within a range selected form the group consisting of 0%-5%, 5%-10%, 10%-15%, 15%-20%, 20%-30% and 30%-50%. Particularly preferred are the cut-offs 10%, 15%, 25%, and 30%.

### Prognostic Assays for Cellular Proliferative Disorders

[0204] The present invention enables diagnosis of events which are disadvantageous to patients or individuals in which important genetic and/or epigenetic parameters within at least one gene or genomic sequence selected from the group consisting of Septin 9 (including all transcript variants thereof) and/or ALX4 may be used as markers. Said parameters obtained by means of the present invention may be compared to another set of genetic and/or epigenetic parameters, the differences serving as the basis for a diagnosis and/or prognosis of events which are disadvantageous to patients or individuals.

[0205] More specifically the present invention enables the screening of at-risk populations for the early detection of cancers, most preferably colorectal carcinomas. Furthermore, the present invention enables the differentiation of malignant or pre-malignant lesions from those which are likely to remain benign (i.e. non-cancerous).

[0206] Specifically, the present invention provides for colorectal neoplasm detection assays based on measurement of differential expression (preferably methylation) of one or more CpG dinucleotide sequences of at least one sequence selected from the group consisting SEQ ID NO: 1 to SEQ ID NO: 2 that comprise such a CpG dinucleotide sequence. Typically, such assays involve obtaining a sample from a subject, performing an assay to measure the expression of at least one gene or genomic sequence selected from the group consisting of Septin 9 (including all transcript variants thereof) and ALX4, preferably by determining the methylation status of at least one sequence selected from the group consisting SEQ ID NO: 1 to SEQ ID NO: 2, derived from the sample, relative to a control sample, or a known standard and making a diagnosis based thereon. It is particularly preferred that the methylation status of both Septin 9 (including any transcript variants thereof) and ALX4 are analyzed.

[0207] In particular preferred embodiments, inventive oligomers are used to assess the CpG dinucleotide methylation status, such as those based on SEQ ID NO: 1 to SEQ ID NO: 2, SEQ ID NO: 3 to SEQ ID NO: 10, or arrays thereof, as well as in kits based thereon and useful for the classification of colorectal cell proliferative disorders.

### Kits

[0208] Moreover, an additional aspect of the present invention is a kit comprising: a means for determining methylation of at least one gene selected from the group consisting of Septin 9 (including all transcript variants thereof) and ALX4. The means for determining methylation comprise preferably a bisulfite-containing reagent; one or a plurality of oligonucleotides consisting whose sequences in each case are identical, are complementary, or hybridise under stringent or highly stringent conditions to a 9 or more preferably up to 18 base long segment of a sequence selected from SEQ ID NO: 3 to SEQ ID NO: 10; and optionally instructions for carrying out and evaluating the described method of methylation analysis. In one embodiment the base sequence of said oligonucleotides comprises at least one CpG, CpA or TpG dinucleotide.

[0209] In a further embodiment, said kit may further comprise standard reagents for performing a CpG position-specific methylation analysis, wherein said analysis comprises one or more of the following techniques: MS-SNuPE, MSP, MethyLight™, HeavyMethyl, COBRA, and nucleic acid sequencing. However, a kit along the lines of the present invention can also contain only part of the aforementioned components.

[0210] In a preferred embodiment the kit may comprise additional bisulfite conversion reagents selected from the group consisting: DNA denaturation buffer; sulfonation buffer; DNA recovery reagents or kits (e.g., precipitation, ultrafiltration, affinity column); desulfonation buffer; and DNA recovery components.

[0211] In a further alternative embodiment, the kit may contain, packaged in separate containers, a polymerase and a reaction buffer optimised for primer extension mediated by the polymerase, such as PCR. In another embodiment of the invention the kit further comprising means for obtaining a biological sample of the patient. Preferred is a kit, which further comprises a container suitable for containing the means for determining methylation of at least one gene or genomic sequence selected from the group consisting of Septin 9 (including all transcript variants thereof) and ALX4 in the biological sample of the patient, and most preferably further comprises instructions for use and interpretation of the kit results. In a preferred embodiment the kit comprises: (a) a bisulfite reagent; (b) a container suitable for containing the said bisulfite reagent and the biological sample of the patient; (c) at least one set of primer oligonucleotides containing two oligonucleotides whose sequences in each case are identical, are complementary, or hybridise under stringent or highly stringent conditions to a 9 or more preferably up to 18 base long segment of a sequence selected from SEQ ID NO: 3 to SEQ ID NO: 10; and optionally (d) instructions for use and interpretation of the kit results. In an alternative preferred embodiment the kit comprises: (a) a bisulfite reagent; (b) a container suitable for containing the said bisulfite reagent and the biological sample of the patient; (c) at least one oligonucleotides and/or PNA-oligomer having a length of at least 9 or 16 nucleotides which is identical to or hybridises to a pre-treated nucleic acid sequence according to one of SEQ ID NO: 3 to SEQ ID NO: 10 and sequences complementary thereto; and optionally (d) instructions for use and interpretation of the kit results.

[0212] In an alternative embodiment the kit comprises: (a) a bisulfite reagent; (b) a container suitable for containing the said bisulfite reagent and the biological sample of the patient; (c) at least one set of primer oligonucleotides containing two oligonucleotides whose sequences in each case are identical, are complementary, or hybridise under stringent or highly stringent conditions to a 9 or more preferably 18 base long segment of a sequence selected from SEQ ID NO: 3 to SEQ ID NO: 10; (d) at least one oligonucleotides and/or PNA-oligomer having a length of at least 9 or 16 nucleotides which is identical to or hybridises to a pre-treated nucleic acid sequence according to one of SEQ ID NO: 3 to SEQ ID NO: 10 and sequences complementary thereto; and optionally (e) instructions for use and interpretation of the kit results.

[0213] The kit may also contain other components such as buffers or solutions suitable for blocking, washing or coating, packaged in a separate container.

[0214] Typical reagents (e.g., as might be found in a typical COBRA™-based kit) for COBRA™ analysis may include, but are not limited to: PCR primers for at least one gene selected from the group consisting of Septin 9 (including all transcript variants thereof) and ALX4; restriction enzyme and appropriate buffer; gene-hybridization oligo; control hybridization oligo; kinase labeling kit for oligo probe; and labeled nucleotides. Typical reagents (e.g., as might be found in a typical MethyLight™-based kit) for MethyLight™ analysis may include, but are not limited to: PCR primers for the bisulfite converted sequence of at least one gene or genomic sequence selected from the group consisting of Septin 9 (including all transcript variants thereof) and ALX4; bisulfite specific probes (e.g., TaqMan™ or Lightcycler™); optimized PCR buffers and deoxynucleotides; and Taq polymerase.

[0215] Typical reagents (e.g., as might be found in a typical Ms-SNuPE™-based kit) for Ms-SNuPE™ analysis may include, but are not limited to: PCR primers for specific gene (or bisulfite treated DNA sequence or CpG island); optimized PCR buffers and deoxynucleotides; gel extraction kit; positive control primers; Ms-SNuPE™ primers for the bisulfite converted sequence of at least one gene or genomic sequence selected from the group consisting of Septin 9 (including all transcript variants thereof) and ALX4; reaction buffer (for the Ms-SNuPE reaction); and labeled nucleotides.

[0216] Typical reagents (e.g., as might be found in a typical MSP-based kit) for MSP analysis may include, but are not limited to: methylated and unmethylated PCR primers for the bisulfite converted sequence of or genomic sequence selected from the group consisting of Septin 9 (including all transcript variants thereof) and ALX4, optimized PCR buffers and deoxynucleotides, and specific probes.

[0217] Moreover, an additional aspect of the present invention is an alternative kit comprising a means for determining methylation of at least one gene or genomic sequence selected from the group consisting of Septin 9 (including all transcript variants thereof) and ALX4, wherein said means comprise preferably at least one methylation specific restriction enzyme; one or a plurality of primer oligonucleotides (preferably one or a plurality of primer pairs) suitable for the amplification of a sequence comprising at least one CpG dinucleotide of a sequence selected from SEQ ID NO: 1 to SEQ ID NO: 2; and optionally instructions for carrying out and evaluating the described method of methylation analysis. In one embodiment the base sequence of said oligonucleotides are identical, are complementary, or hybridise under stringent or highly stringent conditions to an at least 18 base long segment of a sequence selected from SEQ ID NO: 1 to SEQ ID NO: 2.

[0218] In a further embodiment said kit may comprise one or a plurality of oligonucleotide probes for the analysis of the digest fragments, preferably said oligonucleotides are identical, are complementary, or hybridise under stringent or highly stringent conditions to an at least 16 base long segment of a sequence selected from SEQ ID NO: 1 to SEQ ID NO: 2.

[0219] In a preferred embodiment the kit may comprise additional reagents selected from the group consisting: buffer (e.g., restriction enzyme, PCR, storage or washing buffers); DNA recovery reagents or kits (e.g., precipitation, ultrafiltration, affinity column) and DNA recovery components.

[0220] In a further alternative embodiment, the kit may contain, packaged in separate containers, a polymerase and a reaction buffer optimized for primer extension mediated by the polymerase, such as PCR. In another embodiment of the invention the kit further comprising means for obtaining a biological sample of the patient. In a preferred embodiment the kit comprises: (a) a methylation sensitive restriction enzyme reagent; (b) a container suitable for containing the said reagent and the biological sample of the patient; (c) at least one set of oligonucleotides one or a plurality of nucleic acids or peptide nucleic acids which are identical, are complementary, or hybridise under stringent or highly stringent conditions to an at least 9 base long segment of a sequence selected from SEQ ID NO: 1 to SEQ ID NO: 2; and optionally (d) instructions for use and interpretation of the kit results.

[0221] In an alternative preferred embodiment the kit comprises: (a) a methylation sensitive restriction enzyme reagent; (b) a container suitable for containing the said reagent and the biological sample of the patient; (c) at least one set of primer oligonucleotides suitable for the amplification of a sequence comprising at least one CpG dinucleotide of a sequence selected from SEQ ID NO: 1 to SEQ ID NO: 2; and optionally (d) instructions for use and interpretation of the kit results.

[0222] In an alternative embodiment the kit comprises: (a) a methylation sensitive restriction enzyme reagent; (b) a container suitable for containing the said reagent and the biological sample of the patient; (c) at least one set of primer oligonucleotides suitable for the amplification of a sequence comprising at least one CpG dinucleotide of a sequence selected from SEQ ID NO: 1 to SEQ ID NO: 2; (d) at least one set of oligonucleotides one or a plurality of nucleic acids or peptide nucleic acids which are identical, are complementary, or hybridize under stringent or highly stringent conditions to an at least 9 base long segment of a sequence selected from SEQ ID NO: 1 to SEQ ID NO: 2 and optionally (e) instructions for use and interpretation of the kit results.

[0223] The kit may also contain other components such as buffers or solutions suitable for blocking, washing or coating, packaged in a separate container.

[0224] The invention further relates to a kit for use in detecting and/or providing a classification of colorectal lesions in a subject by means of methylation-sensitive restriction enzyme analysis. Said kit comprises a container and a DNA microarray component. Said DNA microarray component being a surface upon which a plurality of oligonucleotides are immobilized at designated positions and wherein the oligonucleotide comprises at least one CpG methylation site. At least one of said oligonucleotides is specific for the at least one gene or genomic sequence selected from the group consisting of Septin 9 (including all transcript variants thereof) and/or ALX4 and comprises a sequence of at least 15 base pairs in length but no more than 200 bp of a sequence according to one of SEQ ID NO: 1 to SEQ ID NO: 2. Preferably said sequence is at least 15 base pairs in length but no more than 80 bp of a sequence according to one of SEQ ID NO: 1 to SEQ ID NO: 2. It is further preferred that said sequence is at least 20 base pairs in length but no more than 30 bp of a sequence according to one of SEQ ID NO: 1 to SEQ 1D NO: 2.

[0225] Said test kit preferably further comprises a restriction enzyme component comprising one or a plurality of methylation-sensitive restriction enzymes.

[0226] In a further embodiment, said test kit is further characterized in that it comprises at least one methylation-specific restriction enzyme, and wherein the oligonucleotides comprise a restriction site of said at least one methylation specific restriction enzymes.

[0227] The kit may further comprise one or several of the following components, which are known in the art for DNA enrichment: a protein component, said protein binding selectively to methylated DNA; a triplex-forming nucleic acid component, one or a plurality of linkers, optionally in a suitable solution; substances or solutions for performing a ligation e.g. ligases, buffers; substances or solutions for performing a column chromatography; substances or solutions for performing an immunology based enrichment (e.g. immunoprecipitation); substances or solutions for performing a nucleic acid amplification e.g. PCR; a dye or several dyes, if applicable with a coupling reagent, if applicable in a solution; substances or solutions for performing a hybridization; and/or substances or solutions for performing a washing step.

[0228] The described invention further provides a composition of matter useful for the classification of colorectal lesions. Said composition comprising at least one nucleic acid 18 base pairs in length of a segment of the nucleic acid sequence disclosed in SEQ ID NO: 3 to SEQ ID NO: 10, and one or more substances taken from the group comprising: 1-5 mM Magnesium Chloride, 100-500 μM dNTP, 0.5-5 units of taq polymerase, bovine serum albumen, an oligomer in particular an oligonucleotide or peptide nucleic acid (PNA)-oligomer, said oligomer comprising in each case at least one base sequence having a length of at least 9 nucleotides which is complementary to, or hybridizes under moderately stringent or stringent conditions to a pretreated genomic DNA according to one of the SEQ ID NO: 3 to SEQ ID NO: 10 and sequences complementary thereto. It is preferred that said composition of matter comprises a buffer solution appropriate for the stabilization of said nucleic acid in an aqueous solution and enabling polymerase based reactions within said solution. Suitable buffers are known in the art and commercially available.

[0229] In further preferred embodiments of the invention said at least one nucleic acid is at least 50, 100, 150, 200, 250 or 500 base pairs in length of a segment of the nucleic acid sequence disclosed in SEQ ID NO: 3 to SEQ ID NO: 10.

[0230] While the present invention has been described with specificity in accordance with certain of its preferred embodiments, the following examples serve only to illustrate the invention and are not intended to limit the invention within the principles and scope of the broadest interpretations and equivalent configurations thereof.

### EXAMPLE 1

[0231] In the following study, the methylation status of plasma samples derived from patients with varying type and stages of colorectal lesions was analysed in order to confirm lesion specific methylation within the genes Septin 9 and ALX4.

[0232] The assays were MSP and HeavyMethyl assays as described above, methylation specific real-time assays for the analysis of bisulfite converted DNA. The assays were designed to be run on the LightCycler platform (Roche Diagnostics), but other such instruments commonly used in the art are also suitable. MSP and HeavyMethyl amplificates were designed to be detected by means of Lightcycler style dual probes. Each assay was run in triplicate on plasma samples obtained from a commercial provider.

### Study Population

[0233] Samples were collected from male and female patients ages 40 to 80 but predominantly ages 50 and older. Case report forms were reviewed by a physician and severity of disease determined. In total, serum was collected from 36 patients with adenomatous polyps (13 female, 23 male, median age 63.5, range 24-75) and 13 patients with hyperplastic polyps (5 female, 8 male, median age 58, range 20-73). Serum was also collected from 22 individuals undergoing colonoscopy for various other reasons without neoplasia or preneoplasia of the colon and rectum (negative control) as well as 5 patients with colorectal carcinoma.

[0234] Of the polyp serum samples 7 samples were taken from patients with polyps >1 cm with dysplasia, 9 samples from polyps >1 cm without dysplasia, 17 samples from polyps <1 cm without dysplasia, 3 samples from polyps <1 cm with dysplasia, 13 samples from hyperplastic polyps of which 11 were from polyps <1 cm and 2 were from polyps >2 cm. The colorectal carcinoma samples were obtained from Stage 1 (4 samples) and stage 3 (1 sample) patients.

### Plasma Methylation Analysis

[0235] Plasma was processed first by extraction of free-circulating DNA using the Total Nucleic Acid DNA extraction kit (Roche Applied Science) and Roche MagNaPure device. Eluted DNA's from each patient were pooled and concentrated on microcon filters. DNA Methylation information was preserved by deamination of unmethylated cytosines using sodium bisulfite as described above. Bisulfite treated plasma DNA in each sample was quantified on the Roche LC 2.0™ device using a non-methylation specific assay for beta-actin. ALX4 methylation was determined by means of the MSP assay. Septin 9 methylation was determined using an assay based on the applicant's HM real-time PCR technology (see Cottrell S E, Distler J, et al. NAR 2004; 32(1):e10). The 90% limit of detection of the Septin 9 assay was estimated as 21 pg by a dilution series of methylated (SSS1 treated) DNA in a background of 50 ng blood DNA (Roche human genomic DNA). The Roche LC 2.0 was also used to measure Septin 9 amplification. A plasma equivalent of 1.6 ml to 1.9 ml of DNA was added per PCR reaction and each plasma sample run in duplicate or triplicate.

### Assays

[0236] Genomic region of interest: SEQ ID NO: 1; Assay type: MSP

Primers:
(SEQ ID NO: 11)
cgtcgcaacgcgtacg;
(SEQ ID NO: 12)
cgcggtttcgattttaatgc
Lightcycler probes:
(SEQ ID NO: 13)
actccgacttaacccgacgatcg - fluo;
(SEQ ID NO: 14)
LC 640-acgaaattcctaacgcaaccgct-p
Amplificate sequence:
(SEQ ID NO: 15)
Cgtcgcaacgcgtacgactcaaaacttaataactccgacttaacccgacg
atcgcgacgaaattcctaacgcaaccgcttaaaacttcgcattaaaatcg
aaaccgcg

### Temperature Cycling Program:

| | | | |
|---|---|---|---|
| activation: | 95° C. | 10 min | |
| 55 cycles: | 95° C. | 15 sec | (20° C./s) |
| | 60° C. | 45 sec | (20° C./s) |
| | 72° C. | 15 sec | (20° C./s) |

### Genomic Region of Interest: SEQ ID NO: 2; Assay Type: HeavyMethyl

Primers:
(SEQ ID NO: 16)
GtAGtAGttAGtttAGtAtttAttTT;
(SEQ ID NO: 17)
CCCACCAaCCATCATaT
Lightcycler probes:
(SEQ ID NO: 18)
Gtt cga aat gat ttt att tag ttg c-FL;
(SEQ ID NO: 19)
LC-Red640-cgt tga tcg cgg ggt tc-PH
Blocker sequence:
(SEQ ID NO: 20)
CATCATaTCAaACCCCACAaTCAACACACAaC-Inv 3′

### Temperature Cycling Program:

| | | |
|---|---|---|
| Activation: | 95° C. | 10 min |
| 55 cycles: | 95° C. | 10 sec |
| | 56° C. | 30 sec |
| | 72° C. | 10 sec |
| Cooling: | 10° C. | 30 sec |

[0240] Results

[0241] A replicate was determined as positive if it presented with greater than 4% methylation, a sample was determined as positive according to how many of the replicates presented methylation.

### Single Gene Analysis

Septin 9

| | Total | 2/3 positive | | 1/3 positive | |
|---|---|---|---|---|---|
| | sample | # | % | # | % |
| Normal | 22 | 1 | 4.5 | 4 | 18 |
| Polyp | 49 | 6 | 12 | 17 | 35 |
| CRC | 5 | 2 | 40 | 2 | 40 |

ALX4

| | Total | 2/3 positive | | 1/3 positive | |
|---|---|---|---|---|---|
| | sample | # | % | # | % |
| Normal | 22 | 4 | 18 | 14 | 64 |
| Polyp | 49 | 23 | 47 | 38 | 77.5 |
| CRC | 5 | 2 | 40 | 4 | 80 |

Panel analysis (Septin 9+ALX4)

| | | 2/3 | | 3/6 | |
|---|---|---|---|---|---|
| | Total # | positive | | positive | |
| | samples | # | % | # | % |
| Normal | 22 | 4 | 18 | 2 | 9 |
| Polyp | 49 | 26 | 53 | 24 | 49 |
| CRC | 5 | 3 | 60 | 3 | 60 |

### According to Polyp Histology

| | | Septin | | ALX4 | | Septin 9 + | | Septin 9 + | |
|---|---|---|---|---|---|---|---|---|---|
| Polyp | # | 9 2/3 | | 2/3 | | ALX4 2/3 | | ALX4 3/6 | |
| Characteristics | samples | # | % | # | % | # | % | # | % |
| >or = 1 cm | 18 | 3 | 17 | 10 | 55 | 13 | 72 | 12 | 67 |
| <1 cm | 31 | 3 | 10 | 13 | 42 | 13 | 42 | 12 | 39 |
| Tubular or | 36 | 5 | 14 | 17 | 47 | 20 | 55 | 20 | 55 |
| villous | | | | | | | | | |
| adenoma | | | | | | | | | |
| Tubular or | 11 | 3 | 27 | 8 | 73 | 11 | 100 | 11 | 100 |
| villous | | | | | | | | | |
| adenoma +> | | | | | | | | | |
| 1 cm | | | | | | | | | |
| Hyperplastic | 13 | 1 | 8 | 6 | 46 | 6 | 46 | 4 | 31 |
| polyps | | | | | | | | | |

[0244] Furthermore, of the 10 adenomas with intraepithelial lesions 80% displayed methylation in at least 3 out of 6 replicates of Septin 9 and ALX4.

### Conclusions

[0245] It was determined that the sensitivity of a real-time PCR assay for detection of polyps larger than 1 cm was 23%. Our results indicate that the Septin 9 biomarker is also highly specific (95%) in asymptomatic individuals over 50 years of age.

[0246] The results of combining Septin 9 and ALX4 in a marker panel indicate that sensitivity for detecting polyps can be considerably improved while maintaining high specificity. The marker panel detected polyps larger than 1 cm with a sensitivity of 67%. Sensitivity for large adenomas (>1 cm) or adenomas with IEN showed even greater improvement (100%, 80% respectively). Specificity of the panel in asymptomatic individuals over 50 years of age was 91%.Patient compliance and performance of current screening strategies limit the effectiveness of tests available on the market today. An easily administered blood-based test for early detection of colorectal cancer followed by colonoscopy for positive individuals has the potential to be a very effective tool for reducing mortality from this disease.

TABLE 1

| | | | Methylated | Methylated | Unmethylated | Unmethylated |
|---|---|---|---|---|---|---|
| | | | bisulfite | bisulfite | bisulfite | bisulfite |
| Genomic | | Associated | converted | converted | converted | converted |
| SEQ ID | Ensembl database genomic | gene | sequence | sequence | sequence | sequence |
| NO: | location | transcript(s)* | (sense) | (antisense) | (sense) | (antisense) |
| 1 | Chromosome | ALX4 | 3 | 4 | 7 | 8 |
| | 11:44238570:44291195:1 | | | | | |
| 2 | Chromosome | Septin 9 | 5 | 6 | 9 | 10 |
| | 17:72786362:73008270:1 | | | | | |

1. A method for detecting and/or classifying colorectal cell proliferative disorders in a subject comprising determining the expression levels of Septin 9 and/or ALX4 in a biological sample isolated from said subject wherein underexpression and/or CpG methylation is indicative of the presence of pre-cancerous colorectal cell proliferative disorders.

2. A method according to claim 1, wherein a malignant or pre-malignant cell proliferative disorder is distinguished from a benign cell proliferative disorder said method characterized in that underexpression and/or the presence of CpG methylation is indicative of the presence of a malignant or pre-malignant cell proliferative disorder and the absence thereof is indicative of the presence of a benign cell proliferative disorder.

3. The method according to claim 1, wherein said expression level is determined by detecting the presence, absence or level of mRNA transcribed from said gene.

4-5. (canceled)

6. The method according to claim 1, wherein said expression is determined by detecting the presence or absence of CpG methylation within said gene, wherein the presence of methylation indicates the presence of a cell proliferative disorder.

7. The method according to claim 6, comprising contacting genomic DNA isolated from a biological sample obtained from said subject with at least one reagent, or series of reagents that distinguishes between methylated and non-methylated CpG dinucleotides within at least one target region of the genomic DNA, wherein the target region comprises, or hybridizes under stringent conditions to a sequence of at least 16 contiguous nucleotides of at least one sequence selected from the group consisting of SEQ ID NO: 1 to SEQ ID NO: 2 respectively, wherein said contiguous nucleotides comprise at least one CpG dinucleotide sequence, and whereby detecting and/or classifying colorectal cell proliferative disorders is, at least in part, afforded.

8. The method according to claim 6, comprising:
a) extracting or otherwise isolating genomic DNA from a biological sample obtained from the subject;
b) treating the genomic DNA of a), or a fragment thereof, with one or more reagents to convert cytosine bases that are unmethylated in the 5-position thereof to uracil or to another base that is detectably dissimilar to cytosine in terms of hybridization properties;
c) contacting the treated genomic DNA, or the treated fragment thereof, with an amplification enzyme and at least one primer comprising, a contiguous sequence of at least 9 nucleotides that is complementary to, or hybridizes under moderately stringent or stringent conditions to a sequence selected from the group consisting of SEQ ID NO: 3 to SEQ ID NO: 10, and complements thereof, wherein the treated genomic DNA or the fragment thereof is either amplified to produce at least one amplificate, or is not amplified; and
d) determining, based on a presence or absence of, or on a property of said amplificate, the methylation state or level of at least one CpG dinucleotide of a sequence selected from the group consisting SEQ ID NO: 1 to SEQ ID NO: 2, or an average, or a value reflecting an average methylation state or level of a plurality of CpG dinucleotides of a sequence selected from the groups consisting of SEQ ID NO: 1 to SEQ ID NO: 2, whereby at least one of detecting and classifying colorectal cellular proliferative disorders is, at least in part, afforded.

9. The method of claim 8, wherein treating the genomic DNA, or the fragment thereof in b), comprises use of a reagent selected from the group comprising of bisulfite, hydrogen sulfite, disulfite, and combinations thereof.

10. The method of claim 9, wherein contacting or amplifying in c) comprises use of at least one method selected from the group comprising: use of a heat-resistant DNA polymerase as the amplification enzyme; use of a polymerase lacking 5′-3′ exonuclease activity; use of a polymerase chain reaction (PCR); generation of an amplificate nucleic acid molecule carrying a detectable label.

11. The method of claim 1, wherein the biological sample obtained from the subject is selected from the group comprising cell lines, histological slides, biopsies, paraffin-embedded tissue, body fluids, stool, colonic effluent, urine, blood plasma, blood serum, whole blood, isolated blood cells, cells isolated from the blood and combinations thereof.

12. The method of claim 11, further comprising in step d) the use of at least one nucleic acid molecule or peptide nucleic acid molecule comprising in each case a contiguous sequence at least 9 nucleotides in length that is complementary to, or hybridizes under moderately stringent or stringent conditions to a sequence selected from the group consisting of SEQ ID NO: 3 to SEQ ID NO: 10, and complements thereof, wherein said nucleic acid molecule or peptide nucleic acid molecule suppresses amplification of the nucleic acid to which it is hybridized.

13. The method of claim 10, wherein determining in d) comprises hybridization of at least one nucleic acid molecule or peptide nucleic acid molecule in each case comprising a contiguous sequence at least 9 nucleotides in length that is complementary to, or hybridizes under moderately stringent or stringent conditions to a sequence selected from the group consisting of SEQ ID NO: 3 to SEQ ID NO: 10, and complements thereof.

14. The method of claim 13, wherein at least one such hybridizing nucleic acid molecule or peptide nucleic acid molecule is bound to a solid phase.

15. The method of claim 13, further comprising extending at least one such hybridized nucleic acid molecule by at least one nucleotide base.

16. The method of claim 10, wherein determining in d), comprises sequencing of the amplificate.

17. The method of claim 10, wherein contacting or amplifying in c), comprises use of methylation-specific primers.

18. A method for detecting and/or classifying colorectal cellular proliferative disorders, comprising:
a) extracting or otherwise isolating genomic DNA from a biological sample obtained from the subject,
b) digesting the genomic DNA of a), or a fragment thereof, with one or more methylation sensitive restriction enzymes, contacting the DNA restriction enzyme digest of b), with an amplification enzyme and at least two primers suitable for the amplification of a sequence comprising at least one CpG dinucleotide of a sequence selected from SEQ ID NO: 1 to 2, and
c) determining, based on a presence or absence of an amplificate the methylation state or level of at least one CpG dinucleotide of a sequence selected from the group consisting of SEQ ID NO: 1 to SEQ ID NO: 2, whereby at least one of detecting and classifying cellular proliferative disorders is, at least in part, afforded.

19. The method according to claim 18 wherein the presence or absence of an amplificate is determined by means of hybridization to at least one nucleic acid or peptide nucleic acid which is identical, complementary, or hybridizes under stringent or highly stringent conditions to an at least 16 base long segment of a sequence selected from SEQ ID NO: 1 to SEQ ID NO: 2.

20. (canceled)

21. A nucleic acid, comprising at least 16 contiguous nucleotides of a treated genomic DNA sequence selected from the group consisting of SEQ ID NO: 3 to SEQ ID NO: 10, and sequences complementary thereto, wherein the treatment is suitable to convert at least one unmethylated cytosine base of the genomic DNA sequence to uracil or another base that is detectably dissimilar to cytosine in terms of hybridization.

22. A nucleic acid, comprising at least 50 contiguous nucleotides of a DNA sequence selected from the group consisting of SEQ ID NO: 3 to SEQ ID NO: 10, and sequences complementary thereto.

23. The nucleic acid of claim 21 wherein the contiguous base sequence comprises at least one CpG, TpG or CpA dinucleotide sequence.

24-29. (canceled)

The application's sequence listing, which the Patent Office published only in electronic form, follows.

SEQUENCE LISTING (20 sequences)

SEQ ID NO: 1 - DNA, 52626 bp, Homo Sapiens
ggaggaaggagaaggagtttattgcaaataacaacaaccaaacagtttgggctgggccagcaaagggtgttctgggagtgcccggctacctctgcactccattttgccccatgcctgggcccctacatctccttcccatccgtgttcctcctctcccaaaaaagatgtaagtgcaataacttactttaaaaggcaagaacgtttcttttaatattttgctataatgtagttacatggtggtataggcagtaaaactttatggaaccgacctcatttttttttttacatttttctggatttttactgtatttttaatatatatttttaatattccaccccaggccattaagctaaaggaaaagttgcatttatacagggttaaaatatcttacaatgagaacaataagtaacggttgaggttcatgttccttctagcactcagctttcttttttcaaccactgcacacctaaacagatgattagacattgaaaactgtccttcaaaatcagtagtataaaggcctagctctatgtgtgtgagtgaagagggaagaaaggagaggccgaggttaggtcatggaagcacctttcctccctacagcatcctgaaagaagtgaagtggggttgatgggtcattgtcaccttcttattttttaactggatagtcacagagtattatcctgggggccagtttaccaaccatcctcccccagctaggcctgtttgcctttgcactggacagtaagggccatgaaacagaccaggaacccccgcgtgtctttcaggttctcgaagatggccccccactgtctagcccagggagggaatgactgcataagcagggtacgtagttttcatggaagcgtccctcgtctgcccagccgaaatgacaggagatggggcacggagctgggtccagtgtgatcacagctgtgtgtgctggggacccaccccacacttgctgcacctaccccatcgcagtgtctttgagctaacctggccaccgtgcttcccgaagctggaggcacggtagtgagcgctgagaatcaagtatagttaaaagaattcaaggaaagttctaaaagcccatgtcctccaagtgctatttcagccttggagacaagcctctctgtgtgccccccagagccctcgctcccatgccccaggagtagtgctggcatctggagggcagtagcagcaccttagtgtcaagccttgccatgctgagacctgtgcccagcagggactggaggctgtcagtgtggggaggctgcccatccatctgccggctacccacgactttatttttaagttgccatctctgttgagatcttaggcaggtatccaaaggaaatcctcacctctcttagcttattcgcatagcaatgaaccacgtggcaggtagatgcttctctccacctgccttcatgagctttagctccagatggccttgggcagctgccctgacttgctcagtcatcctaggagctgacacggcagtggccccctgctctgcagtgcagaaggttgggcctagccacctgtcttggaagggactgggccccaaggttctcttctggagaactgagctgctgagtgaatgcccatgaggcattggagaggggagctccatgcagcaccggccgcccctggtgccaacgaagcccaggccctcacaccctgggtggcacgtcccaggctcctctctcagcctagtctcagggcaagtacaggtcagggcagtcatgtctccactctgggccagggtcttctctgttgtgaagggactggactaactagagggtttctaagcttcctcccaactcggtggtcctatcatacttagtgtggttaggtggcccccaagggctgggccaagccacagaggacaggcctggggtacgtggctgcctttgacgagatgaacaggaatgtttcacattggcatgtttaatcctagacacttcctgggtgtgttgggacaggcagccatagccacagagtcttctaatagacgccttttcttctcaagcttttgggttgaaatttgcctgacttgggtctagcccagccagagagcagacgcatggaggaactgagtgccgggggccactgcggaagagcccccttaaagctctcactctccctccctgcctgctctggagctacctgtctgtcctcctctttgtcctgattcccttgctctccctcctggcccactctggagctacctggctctcctcctctttgtcctgattctctcatgggtgagaaagacccaaggtgaaagttccttccttccccatccttcctcagccatgagcatttcagaaggaaaggggggagaaatggggaaactgttcccagccttaagttcttcctttccctggctagattttgggggagtctgggtcatttcagcgaacctcagaactagaaaaaacttcccaaaagtcactccaaatcctcaaatatttgaaacacttaaagccaagcctccaagaacatttaattcaatgtccaagaccctttcacctctataagatccattttagagctacggttcacaaagaggtctgactcattaagggaggccacagccagacccttcctcagcctggtttctagagcagatgagaacaccaggcaggcgggagactgtcacccccaaccccagagaccctcattcaacaacaccaagtttaccctccgcccaacccaggaggcctttctgtgtccacgaccctgagcatagtgggcctggccctactccatgacaggaatcaagggagaaggtagaaaaggcgagcgcttcaatgcggggcgctgcctgctggagggaccccccacctggggtctgacaggcctgcctctggacggttactgtgtactcccagctgaggtgagggctggggctcagggccagacccaagctacaggggtcgggcaggcaggcacagagccccgcttcctggaggcaggaagcctggtttcaggagggcatcctgacagccccatttgcaatagcaaagccacaccgaggagcccaggccaggagcccttccgcaggctggagagagggcagagagtcctggtccctgtggaagaagtgtaaggacggagtgtggaaagctgtgtggagaagagcaacacctcctagtgcctggagggacacagagcccccatctgccgtggaaggctctgggcagcgatgacactgacagatatggcagggaggacagtcagtttgaggccatagcagggcctggaggccgagcatggccacacgtcctctagcaaagcctgcacgcagcttttgaccctctgccacccggcccccaagctctagcttatgtgttccgaagttgtgagtccttccatgccgggacactgctgagcagccccagggaggggccagggtagggcagggaagagacgagcccctccgcatcctcctggagggaacctgactgggctctggatggagaacaaagctgcccagacctccccgctgtaccagatgccaggcaggccggagagcgggaggactgcccgggcccacgccccacccggatgcctccccctctcccaggacctttccttcttctagcaccatgggagcccttgtggcatctgtgttctcagcctccctcaggtctggctcctcccctatagtgtccagtgaggggctggcccgtgtctcccctggggactggcattgctagatggcagcaggggtcctcggctccagctcctgtcatcctctgcccactctctccaggtgtatccagcctaggggacagccaggatgcagtcagccaggctctgtcagactcgtcactgttcggggggaggtggaggctggcgccttggccccagcaggtcggattccgtgtgctttcagggagagaaagatgggagggcaggaggctggctctgcagggcagcctgtgcttcagacacacagccaccggcctggtgaccaggggaccccactaggagcgggaaggatggacaagactgggctggtgaggctgctgggtctgcatggaaatctagcattgactcatggtcaactaggcagagcagaggagtgggcgggagcaagaaagcgctttcagcttatcatggatgcgaagctgaaaaacgtggccacctggctttctccactgcctgtggccgggagcaggggtcagggcctcagtgccagggaggggccaggggcctgctgccccctccctcccagcagtccacggggcctcagacttggggcggctgaaagtgctgagggtcaggcccctggcccaggccaggttcctaagaggaaagtcgagtgggaggctgggggcctggaaaacatgggcgtggcccatggtgtcccgaggtggggacggggcaggggtgccctgtcatgtggcccaggaaatggccgcactgtgctccttggccttcatgcggagggccgcgatgctcgaggtcttgcggtccggctcgccgttgagctcgtagccattgaggcctgggctgaggctggctgctccaaacaggctgcccatgtgcgtctggcccacgtgactgccagccccagacacactcaggaagtcggtgacgctgctggccccagagccaggggggtgggcatgaggggacatgcaggcaggcaccgggtcgcaggggaccacgcaggctggcactggtgaggcagccccgttgttgccgagccaggacgggttctgaatctgggagaggaagggagagatgtcaccggctggcgggcaggtgtggtgtggaaggggctcgccccttcccccagagcacctctcccctcactgtccatccttcccatgaagcccctcttgagtgtttagccttgatggacatccagatacccctgtgggggtggcttttacaccttggcatctctgttcccagggccaggctagcagcagagggaaattcagttctaaagagtgacctcaggcttcattaagggtccagtggaagggtgacaccccagcaccccccagctggcttcctatttttagactcaactgtagacttggcctccatctgcggatggcagctgtgtctcattcacctccagctcctccccaggcccctcacatccataggcacctgagcaaggtgagcagacctcaactcggagagctttggcctcgcaggttcccttgggcccccaccagtagcagggaagatggaggggttgggtgaggtgggcggcagggacctaaacctctcagaaaccaagggtcagtggctgaggttccagggcctgaactaggaggcttcagaactaactcaggatggaaggggctgcctcaggagtggacagccagatctgagaccggacctcctcgtgccaaaggggcgagggcatgtgcagggatgagttggccatcttatcttccatctgtgccactgggcttcccttccctccccaacgttcacctggggctcccatcttcctctaccttctaggcacgtataaggaggtagaattagggtgtgggggagacccgggaacctctcagcttatgcacacgggattcctggtaacctcatgtgggcttctgctggcctgccctcctgcatgtgtctggagcacactcgagggaggcattttaaagcagggagaaagagctcagcccccatcctggagggaaccgcatttctctctgcggtgcaggggaagggggaccggttggcctccatcaccccctctcagaagaggtctgagcacacactatgtggtgctgtaggtgaggtgggggtaggaggggtgaacagggccctgtgttgggttctccctccagctgtgcgctcaggcagcagagctcaaagccaaggagggagctagagttccatcctgggaggacagagggaggctgagtttagggagggagaggggagaaagagaatggaagaacatagtgcgagctgatgctgatggtgcctgtgtgagacaccccatattcctcagcctcacctccaggcctgtgccctgccctcctgccccatgaatcctgggctgggggagagggaacagagggctggtctggttggagagccagagaccatttgctagcacagaaccaggtcagggagaagtaaaggaggcaggggcgcccgtgctactggctggctgctgagcagggccaggttgggagctgaggtggaggccatgccagaatgaggcctgagcaggtagggagcagccgcttctgctgggcaggctgagtgggggtcaggagaggacttggacttggccaaaaacacatctctctaagcatcccatgtgcctgatgtgactcaatacttctcatcccttgcatctcacactagaacaggggactggctgacagacacctagggaaaatgctctggggggaggggaggacagggccccagaagctgagcacaggcacacaagctttttgaaactgtacaattcacaaaatacttttgcatgattgaatttagaccttacaactgcctgacaacagagctgagcagatgcttttaccatgtccaaggtacaggtgaagaaactgaggctcagagatttgagacttgcctaaagtgagaaagacctggagctggaaagataacctaagtccccggactcagaatcccaagctcattccaacttggccacgagtcctggagatttcagagctcgctttctgaagagaccctccgagcggtatctgagggcctggtggccttctgcctgccttggttccgatgcccacagcaaaagtggccaaagctagtggaggaaagagccgttctcactgccccaaccttcccttccctaaagttcagccaagcctggttcaatgattagttggatagattaaccctgggcctcccacactctggtataaacaggcacacccctggaatgagacggaagggcagcctggagccataagtcatctcggggtgcctgggctctcctccaaggggctcattctcagagcaccaggggctggggatcggtggcggcagctcagggcgggacttacctgggcgtagttctcagctcgggtgaggaggggcagctcatatgcagtggagaagtgggttcgaacctgctgcatctgcccaaaacgctcccgcttcctccacttggcccttcggttctggaaccagacctacaagacgcgaaaaagccattgtcaccagggtgagatgcccgcctggaggcctcactttcaggcagtgcaaactgttcccttgagccccccatcagttgcagtgcgtttgggaaacggtgcggccacacataaatatcaaccttggtctttgtcctcaagagctgacaatctagaatcatccactctgagctgggaaggtatcttacccccactagccatgggcgtgatcctgagccagaacttttatttttctaagcttgagaatctagagcagccaagtgtcaccacctataaaacaagtcactggtcatcttagcagtcatctaagcagactcctgtggagaagctgataaaagctacaaatgctcctccagatgtgttctcctagacaatcacacacagttttgccacagttttccaaaaggttcatggctctctaaggcttattggtccagattcacaatgccttcctccctgcatcctgtctgcagccttcttgttggagacagtctcccagctcagaactcccctgtgttaaagggagaacaggggctctgctgggcaacagaggcagtcagggaagacttcctggaggagggacaggagctgggccttgaatggttggctgaaaggaggaaagccaaggcctaggtttagaaacagcaaggcatactccaaaaacctaaagaggtcaatttgaaggaagcggtgggagagaaagaaacagagtcagatcgcagggggccttgactgccaagtgaagggtttttcccttggtgctgtctgtagaggcagttgctataaaatcttgtgtagaagcgtggcctgatggtgagaggaagtggaggccaacccgtcactgagcacaagtggatgggatgttggcctgattgggagcccaacgggggaggggaggtctctgagtcagctgtgagcactggggtttttggtgacggggagtattgggtccttttcctttgcacgagcatttctggaaggctgagaactttcccaaggctcaagagcaagagctgccctacccctggcccatgacttaggatctggagaaggggtgatggggacggggtgggtgagagagggagagtgaggagggatcagcttccaggccaggaatggctttaggctgattcagagatggaccgtggtgctcctcagagggaggcctctgccagcttgatgtgcacttgtctgctggctttgcagactcagatgcaagtgggcacacctcagacagcacgctgcagaccgggagaacagagccatgacaatagcctcagctgcagagccataaggagccttgccaggcccttccaggcccaggcatcaagaaagccaactttcctgaggtccagtccctgctctccaggtggaaacatttctccatccatcacgaccaatgcagctgctgagctaaatataggagtcagctctcaaaattcctctgcctcagagcctttgagcttcctaggaaccactgcgaggaggggagaaggaggtgtggacgtgcttcctcacagacgctgcctggcctctttgggcatccagtgtagctggccaatggacaggctcataggagcactggtattgccaagggcctcagtttctgcatggcgaatggtacctcatagtcgcagcaggggagatagatgggaaatgcagtccaagaatgtttagagtacttcccatttgtttctttacagctcctgacctttctcactgtcttttgctagaggaaagaggtcaaggaagatggggatgtatctcatgttactgtgaggagggtgggggtgagcaggggtgtacattattatgtttctccactcctgtaccaactcactttcccctccctaatcctaagcatgtgtgtgcgtgcacgagtgtacccactagtgtggctacacgcacgtgcatgtgtgcacacacattgactgggggaggagaagcctcttccttagaaacggaccctctccccagtttggggtctcagcccctgccctggcctcccagggccccttttcctccagggattcctagggtccaggccctggctgcccactgggagccaaggacagatggggtctcctctctgtgctgctgaaatgggatccctctttatcagtggcctgggatgggagactggggccaggatgagagaatgaatcagaggagcttgttttcatttcatgtttaatttcctgcaggcttagctccgtctttccgctccttcctcagcctcccagggttttctgtgggggaagctggggggaggggagaagccactggaggcacggagagagatggcttctctttttctttttgtcactgtgactgttggggttctccttgtgtctctgtgggttccaggtccccatggtgggactgtggaagtggaagatgtccctacaggctctggaacagaggatccagggatgggcggggagggaccccgaagagggaaggaggtggccagcgcctggcaaaggggtctagagtggagggaggagccatgtgggggagtggaatgtggggcgcgggctcgctggagctgagtgtgagggaggaggagatgtgggttatctggggaagacagatgaccaggcgggggagaggccagcagagctagcaccgtctttggaacaggagtggaagaaggtcaggctgagggatttatttgagggctgaagatggaaatggtgagaggcgggtgagcgaccggtgggagcagggctgcccacctcctccctccttcttctcctgttcctttgtcctggggccttaccctgcgcacccagttctggcttttctgcccagatccagacatgagctaggtgagcctggccggtcctcaatatcctccccagtaaattggaggcagcaagggtatcctcacgaccccttctatgctcacatctgcaggtcctgaggcttggagtgtccatccatttctgacccctggcgccccaggggctccgagagctcccttccagatgccacaccaacccccacgcccgttcctgtgcctcccagctctgcaccgcaggcctgtctccactgtgcagccccaggaggacagccaaccacgaggtccccactgttctcccggtctgaatgtcatacctcaggaccaccccagcctgggcccactcagcacaggcctctcccgaggaccgggctgtgcaaggaaccaactgtcttggcggaggcctcgctaaccgcagcccatctggggccagggcggggtggcccagggcggggaggcctctgtcttattgtcttcagacaccagctgcagagattggaatcccagacagcagagagaggcccctgcagccccctggagcagggccaaaccctaggcttcttcccaggaaaagtccatcttggggcccccattgccccgtccctgtccccaccaccactctacgccaggcacctggcttgccaccagctgagtatgggccctgaacaaacacagcagaggcaggcagggggttccatcaccacccccttacccccccagggcactgccaggcttagggctcaacccagaggtctgacgcacatgaagatcccacccaccctgctgcctttatacaaagaaaagcctctgaacaatctggcatgtgtccttgtacagcaaactaaagtcaaagaagcactaggctgcgactcaggagtcccggattccagtcgcagtgctgctactgagtggctgctgttaacttcaggttatgacttcccacctatgggcctcttcttcctcgtctatcaaatgggaagatggggtgatcatttccagcactaccgttctatagttctgtggtcctcccactaggtgataagatatgcagcacgtcagagtttccctttctgccttggctgccaggaagctccaagttgaagtttgtgctcaatggcaaccatgaaccttagcctaaatttttttttaccacattacctctgcatttcatgccattgttcttgtttttagattgaacaaataaatctttaattgtaagctacctcaactccattttggaagtaggtataagtgtgtgtgtgtgcgcgcgcatgtgtgtgtgcagagaacactctgttttagttgtatggtggcaactgaaaaatgctctgtgcgcctttgttttcatgttttgtactcaaggcgtcattcttctttcagtacttagtgaattctactcccgggcactcccatatatttgttaggaagcatgcatgcaacccacatatgcaaacacaaatgtacacacatactgcacagaaaaggaacaggtttatcccacaccaacacagcacctacagggctgtcccataaccagctatgcccctttctctacctacacctgtgggtcctccccaatccatttgctggagatcaggctagatgctaggattcctgtccaaactcaggcatgtaaggtcatgtgagtggctggttgtccaaattcaagtgagatctgggtgtgtgagggcttctggattcacaggaaagccccagctgccctgtcatccttcatcaaacattcattaggcactggaggggaataaaatggcagtcttgccaggtgcagtggctcatgcctgtaatcccagcactttgggaggctgaggtggtggatcacctgaggtcaggagttgaagaccagccaaccaacatggtgaaaccccatctctattaaatatacaaaaattagccgggtgtggtggtgcacacctgtaatcccagctactcaggaggctgaggcaggagaatcgcttgaacccgggaggcagaggttgcagtgagccaagattgcaccactgcactccagcctgggcgacagaacaagactctgtctaaaaaaaaaaaaggcagtctgggctgggcatggtggctcacgcctgtaatctcagcactttgggagaccaaagcaggtgcaccacttgaggtcatgagttcaagaccaacctggccaacatggtgaaacctccatctctaccaaaaaataaaaaaaattagctgggtgtagtggtgcatgcctgtagtcacagctacttgggaggctgaggcatgagaatcgcttgaacccaggaggtggaggccgcagtgagccaagatcacaccactgcactccaacctgggtgacacagtgagatcctgtctcaaaaaataaaaaaataaaaaaaaaatggcaggctgccctcagggaacttacagcaactcaaccgtgcagctcttcagcatcacttctggtagctgcagtttctgaacagctacatatttactgataaccactagtccttttccacattagccattttggaaaaaaagtttgtagactctattagagatgcctctgccttcttaaacagaaaatggttgtaactgatgaatcttttactgatgccttagaacaatgctgctgaagatgctttcatgagttaattcaagagtccctggggcctgctgaggattgcagggttggggcatctctgtcctaacattgaagggctcagcccactgagctgcatggcgctttgctgattaaaaaaaaaaaaaaaaaaaagatttctctttgttctgaagctattgatttttctggcccactggagagggaaaaactgctatgtggcaacgttttatttgctatttccaacatgctttgggttggaaaagcggactgattatgacatttattttgtgttaaattgaaacttaaacttgagtgtgtgaattttgtcacctgtattttggctactcatgggtcttttctttctttctgatcctttctttgctgtgaattcatgctggtcggggcagatacagctctctggacaagggttgattgatccacggatacttattttttagacttgatgctctgcgtttggctttctctaattggtgggaatacagtgatgaacaatcagtgcttgatctcaaggaaatcacagtttagtaggaggggacaaacaagtaaaataacgtaagccagtcaacaatcctgtaaagaagacaaaataggagttgggcacagtgtctcatgcctataatcccagcagtatgggaggctgaggtgagggattacttgaggccaggagtttgagaccaacatggacaacaaagcaagaccccatctctacaaaaaataaaaaaacttatcccaggcgtggtggtgtatgcctgtggtcccagctactcaggaaactgaggcgggaggatccattgagcccacgaagttaaggctacagtgagccatgatcacaccactgtactccacgctgggtgacagagagagacccagtctctttaaaaaaaataaacaaaaatacccaaaagataaaatgggcccaggcatggtggctcatgcctataattctagcactttgggaggttgaggtgggatgatcactttagcctaggagtttgaggctgcagtgagctataatcatcttattgcactccagcctgggtgatagaatgagaccctgtctctaaaaagaaaacaaaaaaaatttaaaaaatttttaagaagataaaataggacagtgtaacaaaaggtgagctggtttgcttctgttgtgttgggttgggttgagttctattgggttgtgttgagtgggttgagtgtgtcaggttccattgtgttgtgttgtgttaggttgagttctgttggaatgtgttatattgggttgtgttgtgttggaaggggctgcattaggtttagtatgttgagttccattgtgttgtgttgggttgagttgagttctattgggttgtgttgtgttgggttgggttgagttctattcggttgcactgagttgagttgagtgtgtcaggttccattgtgttgtgttgtgttaggttgagttccattggaatgtgttatattgggttgtgttgtgttggaatgggttgagttgggttgagtgtgttcagttccattgtgttgtgctgggttgagttgagttctattgggttgtgttgtgttgggttgcactgagttgggttgagtgtgttgagttccactgtgttgtgttgtgttgagttgagttctattgggttgtgttctgttgggttgcaatgagttgggttgagtgttgggttccactgtattgtactgggttgggtgttttggttgttggctggtaataggggggctactgctttagccacagtggtcaggaagacttctcagaggaggtatgagttgggacttgaaaaatggagggggatgcagccatctaggcagaaggaagagctaaactgttctctgtttctgcccactgggatgctgtggacattgtcttcatgtttgtcctgtttcctgtctaagagataggccttctagagcagggacaagtaacccttctctgtgtgaaagagccaggactcttacactgtgtaaagcccagaaacagccagcagcagccttcctgcccctctgctggaggccctccttcctttgcaaccccccaccacagtgcagaagcccaatattaaagaggataaaagcagagtcgctctagttgggacaggggcatgaggggcaggctaggagcccccactttcaggttctcaatgaactgaggaaaggaaagccatggtgtggttggtgggcagtcaggagaccccaactgcagccaagagcccagggacaggctctgctttaccagcctcactcccaggtggccctcactgacctgcacgcgggcctcagtgaggtctgtcctcatggccagctgttcccgcgcatacacgtctgggtagtgggtcttctggaagaccttctccagctcctccagctggtagctggtgaaggtggtccggttccgccgcttcttgcccttgttgctctctgagtcggccttctccaatgggctggggaggtctgagctggcccggtcctggggccccttcaccccagcctccttgacactcaggtagctgctgtccatccccacagtgtcagagtcagggggtaactctggctcacccagggagctctctttagctgagggaggaggaaacaaagtcagaaaccaatggttgaaccaaacaagagaaggggaatgtcagggggagagtggggcactcgggtagccaccccctgcctttttcctcttagagctcattggatgcgaggtccggagacttggcttctaattctggcttgccattaacttgctgtgtgaccttgggcaaatctcttccccaatctgagcctcttcaccatcatcttagactaggtcccttccagcaacaatgttatgtgaacctaaggcagccaatctgacctctgtgacctttaatccccacctcactgaccctgagctcctctctctagagggattccctgcatcaggacttttctggggcccgagaattctgaccccagtgccatggcctccctgggtggaagggaaactcattcagcagccatgtctggcccagtggggcttggggtgaggaggacccaggattgaggcagacaggagtgcccctcctttcctggcctagtcccaccaggagttcagcaggagctgtggagactctgccccaagagtccagtgctgaggagtcaacacctccttccctgccccccaaccctgcacactggtctcacctattgttcaagagaagggtctttcttccttgggggtgcatgggattgaggcatgggccacatttcctgttacaagcagctcctgcccactgtttactgaggctgcccgggcaccttcatccccagcacgctgaccccgggcctgggtgggtgtacatgagcacagctcccagccactgcgtctggcagatggaccccccacccaccggcacattcctagctcaggactgcaaggacgagtcaacccatacacatcaagaaagaagaggtggaggctggggtgggagagtgaggcaagaagccactttaccaccacacagcctggtgagcttcctaggcagacacactcacctcctggcagagggtttgggacaacagtccctacctttttggcaccagggactggttttgtggaagataattttttccatgggtggagaaggttgtggtggggcatggtttggggatgaaactgttccacctcaaatcatcaggcatcagattctcttaaggagcacgcaacctagatccctcacatgcatggttcacagtaggattcacgcctctgtgagaatctaatggcaccgctgatctgacaggagccagaacttgcagtaatgcttgctcacctgccgctcacctcctgtgtgcggcccggttactaacaggccatggatcggtactggtccacagcctgggggctaaggacccctggtttaggtcatggactcttgatagccccgccatgaatcctatggccatgactccccagctgtgtgctcaggagagcttacctacccgctatgtgcctcagtttccccctctataaaatggggatgaagatacttctaggatcttcctcatagggtagctgtgggaaataaagaggctagtgtgctagctatgtagttttgccattattgatattcacatttctagtctggacttgcaaacccacagaccctgtgaacattagaggactccgaccctggagaagtcctccaagcatgcaggcccttgggcacaggagcatgtgcagggcgtgcacagatgcctagggaagggcagccaactgggtgtctgcagatgtgggtgtgaactcctcgagaactgtattccttgtctgtaacttggggaaaaggaacttgttgagtgaaagaacaaacacaattaataagacgtttggggagcatttgacacgacctttcacgtgcacgagctttgatcatcacaacaagcacgtgtggtaggtgtgagcatcagccactctgacccgcggtttcttcttctggaaataggtccaagcgatgggcattaagtgtcagaatgatgcctctagtccaggtcttctgactccatccagatcctgagggctgaagcttcagactcgtctcattcctggctttctgtgcacactggggaagctgagagggacatttggcctgtggcattctcgcctccctctccaaggcatcaaggaaagggcatagaggtgagtgcccagagtaggcctgaaagcagcttcaggaggctgctcctgagggccactggcagtgcagacgccatgggggtgcacgaccggcccagcggcatcacgcatgacacctgtgtgagcccaggcacatgcagacagccatggcttcagtgacaacattctgcaaactgcagctggcagctgggccaagagctttcagcaaagatatttatcttcctggcagacaaatacattttatgttttaggttttttttttttttttttagaaaccccacccagcctcacaaaaataaccatccctgttttgcaacttcctggaagccagatgaggggctgagggaggtgagcactgagccctgagctctgatccccaggccccatctcacagccccatagacgcttgctggggattgggaccaccctgcacagcaatgggagctccatgttacaggaactgagagttggtatggaccagcctgaactcctagttttaactggggggaaactgaggccagagagagaagggaacatgccccaattccggacagagcacagcctctcagctcctggcctgccctctactccctcccctgcggtcttaggccttattcccagggagagaggtaggggcagaaggaacccaggggcctcatatgaccaaggcgtcctgctctgtccatcttgtggggggcaggaccagcccttgaggatgagggagtgaggatgcggcctgggggcagcctctcagcactgagccagctcttggcctttcaggggaagtggcagaaggtccagtcttcatggtgacaagtaagggtccagttttgcccacctccagctgcccactgagaccaagtgagcaggcagagatagaggtggcacagggtgtgcgaagaccaccaggccaagagttgggagccctggcctcggcccccgctcttctcaggacttcagatgacccatttcatctctggagtctcacctacaaatagggagagcggggtagttgagggtccctcctcccttgctcaccagcagccaggactgtccctgaggacctggggaggggaggagagggggagggtgtgcctgtgtcagagatggaaggaattcaggggagcgctgctcctggttcctcaaggaagaaggaagcaagccttctaacctgtcttgagtcagcttgctttaaattctgaggctgggttcctcatttagacaacaaagaaaaattccctgaagttctgcagctccactcaactggtcagaataacaagcacagccctctcagagtctgagtcctaagaccccaagctcaggctgtctatgtccacctctcgccaccctgcagcatctccacctggcgctggttccagtctagggtagcagggagctcactgcccccaggacagcagaactactcatctttagacccagcccatgtctgtctcctgtaggtctggttcactgattccagttctaaccccccagcgcccttccccatgacagccctgtccctgcggacattgggaggctactgccacccctctgagtctcccttccttctgcagttcccactgctgttcctcgggtggccctgagtttctccggcctgtgtgagacagagggtggcagggatgatatgaggagtggggctgggccctgggcaaagccagcagattgctctccagggagatgaccccgggctggctggagtgtcagcatggtagctgaaggcctgggtgctggtcagatctgactccccgcaaggtgccctcctcagcaagacggctgctgaaaatagaagtcccatggctcaggctgactgctcctgaccaaaggaaaccactgaccttggtcccccaagtccccatctcgggcccctgcctggcatgttcctccttccagctgacctccaagatccaatgctcctccaggaagccctcccagattgtgactgttttccatcctctgctcaccctctccactgactgcctatgtttgctgactcgtaatctcatcaagccccgaatgtccagctcctcctatagaatgtcagttccccaggggctgggacctcatgccgtttgtcccttctcagcctgaggctcagcacaggataggtcaggtggcagagatgcagtaagaggttgctgaggaataaatgaacaatttctaactaacaaacatcactgagctctcgctctgtccaggtatctgtgtgcacctttggtgagccgatgttctatagagcatgtgcagaaaatgtctctcgagtaaatgaaccaaccgcctcatcctcctacccactggggagaaagtcgggtgggatacattgaaaaagggcacgcaatgacgaatgccaccattcaaggctgacagcacaaacagcaaaggtcactgcgggagacaggagagaagaaagacccagacagaccttgagcgatgtctccatgcagagagcaagggacagaaggagaagcagagacgggcttcataggggcggctccagaattgaaaccaaggtccagaaacccagtccaggatctgccaggaactggctccacacccaccctgccaccacactggggtagagaagaccgccagggagctctcagtttgcctggatgctgggcaagccttcttcagagccttggggcacctcgtgctggcataaggctgagcagcaacagcgcccagcgtgggtccaggccacccgccaggggttggacttctcacatcctccctggagcagctccttgtggacccggaaaggctctatgctgatgcccctcccatgatgagtttgtcccagggctgaggctatggggtccaagacaatgtagtcccaatctgcagcttcccagtcttgatctggaagtaaacccctgactacttagagccatcaatcaagtagtgaacctacatcactgagagcaatgcctgctccacggagggtgttgtgcacgcagtgtggccatcatggtatccagtgctcttcaaacaatcctaggtcagcattattgccatagactgcttttgatgaagtgggaagcattcagttcaaggttgtattctcaatcgggagccactgagcccttcaacctctgctggaactccccctggggggacccccgtaccactgggagctgtcgtttctagtgctgggaacccctggctgttggatttcagctggagaaatgcatgaagtggaaagccttgcttcgttcccttaacctctacccatctgtcctggttcaacccaatggcatcactctaatctagttttacctttttaaaacaggaaaacccttgagaggtttccaaaggtgactgatttttcttttttctttctttctttttttttttggccgtgatttaaagaatgaccttctagagccattttagggagagggtgctggtagcatctgtatgtacagatgtacacccgagggcctgtggcacaagtctgccattgtgagtgggtgtggggaacatatgtgtagttgcttgtggataggtttgtggagtgtgcatgcttgtgtggtcaagcgcaggcacacaagtgggatgtgtgtccccgtgggcagttgtgtgtgggtgcagatccgcgtgggtgggtgtggacatgggtggtgtgggcctgtgtggagccgtgcacaggcccatgcatatggcgctaaggggtctcagtcattttatcctccatggttttgattacatctatttttcctccaaacatctgctttgtgggggacatgccgcttgctctgttctcgggtgagctggccccacacaccctgtggcggagtgcacacaccgatgtaatctccttaaaaaaaacaggccagcatgaggccctttcatgctattgaaagggcactgactaaacccactgctgtccaaacggtcctgtgggggtgagggcggaggttaaagtttagccattgatcacgtccccaccccacctcatctgacactggggtctgtccagagctcaacttgaatgtccctaatttagctccagtcccaataaataatgccaaaggggtagtagtgactgggcttagatttcagcacacatgcacggggcacagctgtttgcagagacagacagtgtcccggccctcaaggggctgccaatcttcagcagagggtggggtggaaatggcagtcctcaggctagccagtggcacaggccatcctgctcacccacagccaccaacccaagccctgaaatgctctcgaaataaggaaagtctgagaaactgccccagactagaggaggccaaggaaccatgaggactaagtgtaatcaatgtgttctggggggaatgctggaacagtaaaaggacattgggggaagccagtgaaatctgaataaagtgtggagtgtagttaatagtaatatttaacaaaaagtgggcaaaatattctagcagacacttcacccaagaagatctacagggagcaaataagcatgaaatatgctcaacctcattacccactatggaaatgcaaattaaaagcacaatgagataccactatgtgcctatcacagtgggaataagacctgatgatgccaagttacggcgatgtatggagcacccggaactcccatccatcacagtgcaaacacttgggcggtgtcttatctagttaaactaacactgacctcatgacccagcaatcccactcctaggtatttaccctacagaaataatgacttattttaagaggagaggaacccaaacccataggcaaatgtctgcagcagctctattcagaatcaccccgaaatggagacacccccaagtgtcctttgacaggggaatggagacgcaagctgtggtctatccaggccatggatcgactccacagtgaaaagaaagaactgttgacaatgacatggatgaatctgaaaggtggccttagggtctgtaaacaaagccagtctcaaatttacatgaagtgcaactgcactcagctagcacatgaattctgggaaaggcaaaactacggggactctaggcaacagatcactggttgccaggtgtaggaggagggggaaggtttgtttacaaagggcttgcactggtgtgatggaactattctgtatcctgactgtggcagtgaatacatgaatctatacatgagtgtgttaaaactcataaaagtatataccaaaaagttttttacagctgggcgtggtggcttgcgcctgtaatcttagcactttgagaggcagaggcggatggtggatcacctgaggtcaggagtttgagaccagcctggccaacacggtgaaaccccatctctactaaaaatacaaaaattcgtcgggcatggtggcagccacctataatcccagctacttgggagggtgaggcaggagaatcgcttgaacacgggaggtgcagattacactgaactgagatcatgccattgcactttagcctgggcaacaagagcaaaactccatctcaaaaaaaaaaaaaaaaaatttacagcatgttgttttcaaattttaaaaaatgtaactaaaaagaaaatacaaaattgtgttcatatatataaaacaaaaactaaattaaaagtttatatgccttcacccagaaatctcacttctaggaatttactcaataaatgatggtaagcattcactagagagaacgttcatcatgtcatagtttaatatgtaggaaaaccgacagtaatcaaaatattcaacaataggggattggttaaataaaggatgatatttccataaatggaagatccttcctgatagtctttattctgcacgttgtttctttttttgagacagagtctcgctttgccacccaggctggagtgcagtggttcgatctcggctcactgcaacctcacctcctagattcaaacgattgtcggacctcggcctcctgagtagccaggactacaggcatgggccaccacaccccgctcatttttgtatttttagtagagacggggtttcctcatgttgcccaggctggtcttgaactcctggcctcaaatgatccacccgtcttggtctcccaaagtgctgggattacaggcatggaccaccgcgccaatattaggtatttatttgttcttctgttttccccttgtttattgtctctctctctctccctcccatggagcagggaatatatctgaacatgtgtgctttgtttaccctgctgtgtaacacctagtatcatagctggcatgcagtagatgctcagtaaacatttgatgaacaaatgaatgagatgatgctaagaaaggatagcgttttaacacatgcaaagatgttcaatttatatcaaataaatctcattttgatcaaaaagaggaagggagtggagcatttgtcctcagaaaatactacaagtttccagaagtggcaatatgggtctatgggttaattttgtttcttttctttttttggggggcggggcggggctggtctgaattaattttctatttgttttcccaggaacaggttgaaatatctgaaagcagtgattagaatcctggatggtgcatgctctgagagcgggctgggctctgtgctgtgggattatgggaagcaagagacaagcaccacttggagagactcagttaaactggaattttagataaacagttaacactttaaacaatataagtatatcccaaatatggcacaagaaatacttttatcctacaaattattcattattcaaatgcagatttgactgagtaacctggttttgttgtttgcttgcttgctttttgctaaatctgccaaccctgtacatcaggcttatgtggcattcagggtcccgaaggcaggactggtccccaccagactcacggacttacacgccagccttccatctagcttgaggttcagagacctgcttccgctctgcagcgcactgcacgagtatcttcaggcttccgcactcctgcgggcacccttccttctacctagcatgtctctctgcctctcctgtctgtggctaactactactttcacctggatagctttctctgtaacttttgtgacttttctttcgcattacaaatgtaatctatgttctatatggaagattaaaaaaaaatcaagacagaccaaaagaaaatcactcacacacatacacatacacacacacacacaaacacacacagagaaaacattactttgtaaacttttgtgtttttttttgagatggagtctcgctgttgtcgcccaggctggagtgcagtggtgcactcttggctcagtgcaacctccgcctccccggttcaagctattctcctgccgcagcctcctgagtagctgggattacaggcacccagcaccacgcccggctaatttttgtactcttagtagagacagggtttcgccatgttggccaggctggtctcgaactcctgacctcagatgatctgccttcctgggcctcccaaagtgctgggattacaggcgtgagccaccgtgcccagcctataaacattttagtaaaatctaaccatattccgtacccctttccatgctgttctatattcttctaccacaccatccttaatggttacgtagcgagaacaatcactattttatttaatccatccttttctgttgggctcacaggtttctacttgtttgaaatcatagcaggtctgtgatttaaatctctcaatacatgcatggcgattcccttaggagaagctccaagaactagaaatatgaagttcaattatccacatatctgagggtctctgagaaacacggccaagttgtcttccagaaacatgtaatgtcctcagctaccacggtgtcccctcccacttcagagccaataatggtcattatagtgtttttaaaatctttgccagcacgatggatgaaagtgagatcttgtctttcctttttttttttttattttttaactatggaacattttattttttgttttcttctgctgtgaattccctctcctgggctttcaaagctcagccaagggccacccttcttcctccaggacctcccttgcctcttaaacactgaatcccctgctttacagcaccggctcatgggcctgctccctccctagactgtgagctggtcagagtgggcctcccagatgtactgctggggcctgggcctcgtgtgagtaagggctcaggacacacccctggaattaatgcaaatgcctgtgtgtgcctgggttgagggagactcctctgggctccttctgcctctggtttggctggggcagctctgcaggcacagctgagggtggccagtgtgtctgcaggaaaaggccccaggccctggagctgggctccagacacaggaggtccttggtcccctgcacacactgcttgtgtcaggaggctgctgcatggagtcggaagaagggacctttcaggatgaggggggtcgaggaaaccagccacagcgcagggcaggaaggaccaaagatgaccccggcagctccctggccctggacaaacctcttgccttctgtttgctcagctcaacaacattgcatgaattcctgccagggaggggtatgagaagaggagatggaggggcacagccctgtgggaagccaagactgaagaggagtccccggccctggctgcttacccagaaggctaagcattcaggttccagggcccaactcccagcaggccaagatcaagactgcagttgtgcatgctggccaccaggaggcactgcagttccaataaagtcactggacggaaggtgatgatcctggggccccagtgcctaatgaggtttctagacgtttgtttgaagacccaggtcctagctgggaggatttgccactcaagcagtaattcagccctactacgcgtctgccaccattccagcactacaagggacaaagagatggatggggcgggtcgctggccttccttgcaggggtctttcctcccctagttctgggtattttcacattcctgcctcattccagtctcctcagaattcccacactgtggccccagcatcctcattggacagacggtcaaagtgaggcgccgagagaagggacccaccagtgtcactagtgactgagtgacagacaggctgagacctgggctctttttcattccttaagtggcctccctttggagacccatggggattccttggccctccagagagggtggcgcacagtgggtgctcaggaaactgactaacttgcaaaagcctttgccttgcaaaagctccctaggacacccctgtcgtttggcccagcggctttccatgtggctggcagacttgttaccagcttccccgtgggttcttcccgaggcaggcatccgccgaggcagggtctgccaccccgtcctccactgctccgccctcacacagaagctctctcagttcttcctgcaatggcaggggtgagtggggaggactgtttttctcttagtctagagatggagtgggcttcccagagtccaggaacgaaaagggattaatgctgggctctcgcaaaaacaaaaaacaaacaaacaaactaaacaaaaccaggaactgggctttgtactttacaaagtactagggcatctattatgccaccagtagggttccagcctctttacaaccgccaggtttccattttatagccccagaaactgaggccagagggggtaaatgccttgctaagaatcaataactgttaagaaggtccaggggtggtggttcatgcctgtaatcccaacattttgggaggccgaggtgggagagtcacttgaccccagagttccatctagcctgggtgacagaggcagagacctgtctcaaaaaaaaaagaaaagaaaagaaaagaaaacaaaaaactggtaagaggcagagctgagacttgaatctcatgcctggagcatgcctactgggccctcctggggtggatgctgtgggtgggactgggacaggcagacaggagacagggtcaaggaggaagggaggaagtcacaggagaatggctgctctcagctgcctcaagagattggcccccttgcaacaaccttcaaggctgcccctgatcaaactgctctgctgaagatcaacttcattgaccatctgggacctcagatgtggaccagtgccttgtttcagggcctacacacactgaagtacttagaggcaaagaggcatatgagtcatatgtctgcaacttactctttttttgtttgtttgtttttagacaaagtcttgctctgttgcccaggctagagtgcagtggcacaatcttgactaactgcaacctctgcctcccgggttcaagtgattccctatgttggccaggctggtctcgaactcctgacctcaggtgatccaccttcctcgacctcccaaagtgctgggattacaggcatgagccactgcgcccagcctgcaacttactgttaaatgatacagctgtatatcgtatgcatgtatatcaatacatacataaacagagcatatgcacagagagagacacagagagagacccagagagattgaaaataatgcaaatatggcaaaacatcaccatttggggagtcagcataaaaggcatctgggaattctttgtagtccacttataactttaagtgtaatactgtatcaaaataaaaaggtttttaaaagaaaaggtatgtggactaatggaaagaaggcaccttccctaggaacccctcttgtgaagctggcatatgtaatcatttgaacaggacctggatgagtttacctggcaacctccccgccttcccctcatcaccaccaccattcataattctacaaggggccttgtacgttgcaataaaaatcacaagacaaatgccaactctgggagcacacattgctccccagccctctggaagccctcactcccgtggaagccactgtgacccaattagaacatggggctcctttaagcagctcttctgagagctgtaggagaccaaggtcaagctactgttggaacttaaaagtttaaaaagtactttaatttttgagtctactgtaatttcaactgtcctacagttagtccaaatgagtaaagtttccttgtataaaaaaaagaaatggtggaaagaaagaaccctaaactttgtccagccctcagcccccatggcccctctgccaaggcctgggtcccctccatcccccagcttgtgtctggaatttgtctttcctgttctctcccccaccctgtgtcttgccttactgattcattcagagcttcccttaggaatcatggcctagtggaagagatgcatgagggacaagcacggtcaagtgttccagggtccccagggcaaaagtcttgtttcccagacacggcagggcccacagaaaggagcggtcaattttggttgaaaaggtcggagaaggcctctgcaatggagtggctcttgaattgggtattgccagtcaaggaaggctcggcaaggcatgttgcattttatggtaaaacaagataccaagataccatcccctcaccccaaatagggcaaatcccaaattaccaagctccttagacaggagctctccaaccagggctgattacaaccatgacagcaataatgtaatgccttgtattcgtgttgccctgacccacccactatctcctctgaccctccccagatcccatgaggtcagtgttggtatctctgtttcacagatgagaaaactgaggtccagtgaagatgaataacttgctcaagatcacatagctaggaggggcagactggatggtcccatgccaagtccactgcctttcaaggtggtgatgagttatctttctaacatggaggggtcaggcaggcttcattttgttctaagggggcattgctgagccactggggtcatttctatctcaaaggactagggtaaaccaagcttcagggtctccatgagaagcccatgtatgatctaacacttggagatcacttcctgatgcctcctggggtgggatgggtgttccagcttcagtctgggctctaagtgcccctgtcagcttctctcctcaaggaggctagaagtttcccggctcctcgtcccatccccaagctccatctcatggcgtgggtggttggatgagaccctgtccccggcaggacccactgccagagaaacagagtctcccatgctctcccctatcccagcaatacgtccgcagggttcagagaccccactggaccagaccctcccttcacagccaagatgcggaggcccagagcaaggtcatactgcctgataatggaagggccaggacttgaaccctgcacctcctgcatccagccctgtggtctgtctgcccattgtccctctcaagccccctaaaccatgtggccctgggcgtgtcccaagacatctctcacttaattcccccaagcctctgtttcccttctgtagcagaaagaatcctgcagctccaccaccttcaccaagacactgtaatatcactttcatccagaggctggcgagatggaggagcttagatcctgcacgaggcaaaatgaaatgattgagaagtctttggggtaggacaggcctgggcttggcccctggctctgccacttatttgctacattgattcattcaacagcattcctggagcaccagctatgcactgggcaaagttccaggtggtgaaaatataaagcccagtaaaacacagtcccttccttcaaatggctcgcctcagtgacaggggccatggttacagtgcagggtggtgaccagggcaggggcacctagcccagccttggggcgactccagatctctgtagaggaggtgttttgaagcagcaatgttgttggagaggtctgttgaagctgtgtttagctaacgcttcacataagactagggaatgccagttttccccatgaaagaaatgggagccgactaaaggagattattaaggaggctcccaagccaccttgtggttctgccacagaagggtatccttggaaaagtgacttgacctttgtgtgcttcagtttcctcatctgtaagatgaggctgagaacatccacatcccagaatggctgtgaggtctgactgaagtagagtgcaagacggcatatcccctgacccacacacggcacccactctatcaatgggacgttgccatgatatattaacacagttatgatctggggatgaatttggccgtggcagctgacagccagggcaacgttgctcagcctgcaactgtgtcacccccacctgcttccttccccaggtgcatcctctccagttcaggtttcccgagcggcagctcccagaatgacatttatgaaccataaacctctgtcaaaagtagctcccagggtccctttcaatgaagggcccatttcacatacatataacaaagactataaatggggtgaaacattggcaactgctgtaaaaatcaaatgttaaatttatttggttatatagacttaaaaaaacttttaaagagtggattcacggcagcctctgcctttagactgtgccctcaccaagggcaggggaggggtgttacgaggcagcgttatcactcgccctgcctgttgtcactgtctggcacccaagtacgtgctgaattgagctaatcttaaacaattgaatttctttctttctttctttctttttttggagacagggtcttgctctgctgcccaggctgaagtgcagtggtgcgatctcggctcactgcaacctccgccttctgggttcaagcgattctcctgcctcagccttccgtgtagctgaggctacaggcacatgccgccacacctggctttttgtgttttagtagagacagggtttcactcttgttgtcccggctggtcttgaactcatgagctcaagcaatccgcccgcctcagcctcccgaagtgctaggattacaggcatgagccattgcgcctggccaaacaattgaatttcttagcctgcagaagcagcatatgatcccagaaagaatgtgctgctttcaccaacatcaaatcttttctttctcaaatgtgctccttctttaatttttatttatgtatttatttatagagacggagtctcgctctgtcacccaggctggagtgcattgatgccatctcggctaactgcaacctctgccccccaggttcaagccattcttctgcctcagcctcccgagtagctgggattaccagcactggtcactgcacctggctaatttttgtacttttagtagaggtggggtttcaccatcttggccaggctggtcttgaactcctgacctcgagatccaccctcctcggcctcccaaagtgctgggattacaggtgtgagccacctcgcctggcccaaatatactcattccaatctagagaatcacttacaaactgaaaaagcaacaaggcttttctccccttggatgagaaagggaaagtaatggctcaattaattataagattgctttttttttttctgttgcctaggctggagcacagtggtacaatcacagctcactgcagcctcaacctcctgggctcaagcaatcctccctcctcagcctcctgagtagctggtactatgggcacacaacatcacagctggctaattaaatttttttttttttttttttttttgtagagacgaggtgtcactatgttgcccaggctggtctcaaactcctggattcaagcaattgtctcacctcagcctcccaaagtgctggaatacaggcatgagccaccatgcccagtcctagtttgtactttaggaaagtcatcaacttccttaaagttgataagaatgggaaagattcttcaatatttgctttttaaaaaatccacatttacaactataaaatagttaacaattcaaaatatctaaaggataattatacctaaaagttttggttggtgtttttgtataaatgactgggatttggagtagatgggttcccaggattttgcctatcacatatagtaaggataaaatataaataatcaatgtttcagcattcacaattaacatgttagttaaaaatggttcttttggccccgcatggtagctcatgcctgtaatcccagcactttgggaagccaacgtgggcagactgcctgagctcaggagtttgagaccagcctgggcaacacagtaagacccccatctctataaaaaaaatttttaaattagctgggcgtggtggcacaagcctgtagtcccagctactcaggaggctgaagcaggagaactgcttgagcccaggaggttgtggctgcagtgggccatgatttagccattgaattccagcctgggtgatagtgagaccctgtctgagagaaggaaggaaggaaggaaggaaggaaggaaggaaggaaggaaggaaggaaggaaggaaggaaggaaggaagcaggcaggcagggagggagggagggagggagggaaggaaggaagaaaatggttttttcattgacttctgctcatctgaacaaaataaaaaattcaaaaaagtctcttctttaaaatgcatgatgtggccaggtgcagtgtctcacacttgtaatcccagcactttgggaggctgaggtgggcggatcacctgaggtcaggagttcgagaccagcctggccaacatggcaaaaccccatcttaaaaaaagaaaaaaaaatatatatataatgcatggtgtgtcccttctaccaagcaaaccttaatccacagcgaacgtgagacaaatacatctcttttccacctgttactacttcttggcaggatggatcccctgcaacgggatagatctcctgagaggatactttgtgtagcacaaaactgggctctgtggaatcttctctcatggggctaaatcctgggggatgcattaatacagcagagcttgggcacatacattccctgaggaggcctggccctcactgtccacctgccacatggtacaagtaatatttccaaactggcctcttgcccctggcttcgccaacactgggctagtgaggaggctattactcgttctgtttagaagggtttgtctcctccttctttacccacaggagctgctcccacatatcacatgggggtcctgggctgggctggcctggttctcaggatggctctggagggaggagggagtggtgtctgggcggtcaggggacatggtcatcatttcagtagatgggcgaagatggtgtagcccacgtacaacatgcagtgtgctgaaaacccctcccagtgcaccccctccaccgtctacagagctctcacatgctggtcaagtctgatgggcacataggcatgagggcatccaggcagtgggcatgagccccctgggcaggggaggaaaaaggctctttggcttcaggagatctgggttcaattcacagcgggacagcctcaccttcctcatcttcaaattgaggatactaatatctcccagtgggtttccacaaaaagtctcagtccaggtgtggccaagggcaatgcccaccaggtgctttcttaattgcagatggggcccaggaagctggggcccaggaagggtgcagaggttgcctgacattccctgagcccgattctctgtgctcagccctgtgctgatcagagaggaacacagcagaacccctgccctggggacaggctgaagttctgggtcaaataaacacagaaaacacattcagcagggagagagttattccccagctcatgacacatgtgtacgaggtgcagcagcctatggggaggaggggcctgaggggcctgggtggcctttgtccctccttgaagcctgcccccgctgcgttaggtagagatggcagcccccgcccctcccatcactcatccatgttttaaaagacaatgtcaaccacacagtaatcatagattcagtaataatttcttcattttccaactctatgcatcccagtcaactttaactgcctgtcaaggtttccggccagtctgatagagtcaaggttccagcaaaatcttatcaatcataacagctaacattgactgagcacttactatgctccaggaactgttctaagatccttacctatttatttatttatttatttatttatttatttatttagagacagagtttcgctcttcttgcccaggctggagtgcaatggtgtggtctcggctcactgcaacctctgcctcctgggttcaagtgattctcctgcctcagcctccctagtagctgggattacaggcgcccaccaccacgcccagctaattttttgtatttttagtagagacagggtttcactatgttggccaggctggtctcaaactcctgacctcaggcaatccacctgcctcggcctcccaaagtgctgggattacagatgtgagcaaccacacctggctttgtccttgcctattttaccttatttaagcctcaccctatcactaacaggtagacatgattcttatccccactttacaggtaaagaaactgaggcaaagaggtcaactaatttgcccaaggtcactcagctatgtgggctgaaatctgtttccaggtcctgagcttcatgggcttctccaaaccaaaggcatctgaagcatcaagcagcctgtgtagcacaattgtggaatgaacagtttccatgattttccaagaaccctagaaattatgccttagggcacatggctggaagaccaggctcaagcaggcctctgtttagtcacctaggccggggaagttcctaggaaggggagccggggacagctacttctctgcagctgtgctccccttggactctgctgtctagtccctggagccccagcccctggttgtgccattcactggatggcctagggtaggggacagggagttgcaagtgcctcttttgggaatctaacagaaaatcttcaaaatatgcatggggccaacagcatggagccactggatgcttccttcttggagctcctccaagctccgctggaaggattctggaatcatcttaataaaggaagtggtcccagatgtgcgcatctcaggaggtgggtgtatagaccctcagagcacaaaagaatttccccaaaggccacgtcctcatgggatggtcaactgaaggggcagaggggcccccgaatatccaggggcctagccagggccaagactgtggctctagagtcctcgcctttggctctgccctccaccccttctcaccagctccaggtcccggaaaacaaatgtgtccttgagctgaatttctgtgacctgttggtcactggcctgcaggcaaggagatgaacggatggcctacaagggtccttgtacattctgcaatcctggacttcacatcagaagatcattcaggggccagatagacaaatgcaacagaatagagaccagatgtaaactctcaaatacatgcgcaattgattttcaacaaaggtcccaagaccggtcgatgagaaaagggccatcttttctacaaatggtgctgggaaaagtggatatccccataaggaagaatgaagttggagagccttatgttacgtcatattcaaaattaaagtcatcaaagacctaaacctaagagctaaactataaagctcttaaaagaagacataggcgaaaatcctcctgacactggagttattgacgatttcttgaatatgacaccaaaagcacagacaacaaaataaagaaattgaaaaattgtacttcttcatcaaaatgtaaaacttctgtgcatcaaaggacagtatccagggagtgaaaggacaatccatagaatgagaagaaatattcgcaaatcatgtatctgaaaaggaattaatatccagaattcctatgactgaagaacaaggaaacaaacaaccccattcaaaaatgggcaaagtacttgaatacacttctccaaaggagatacacaaatggccagacgccaaaggagaatactgtatgattccacctataagaggtacctaaggccaggtgcggtggctcacacctgtaatcccagcactttgggaggctgaggcgggtggatcacctgaggtcaggagttcaagaccagcctggccaatgtggcaaaaccccatctctactaaaaacacaaaaattaggcaggtgtggtggtgggtgcctgtaatcccagctacttgggaggctgaggcaagagaatcgcttgaacccgggaggtggagattgcagtgagctgagattgcaccatttcattccagcctgggcaacaagagtgaaactctgtctcaaaaaaaaaaaaaaaaaaaaaaggtacctacagtaggaaaatccacagagagagagtagaatagaggtcacttgggtggggggtcaagggtgtgatggcggttcccgtttaataggtatggagtttctgtttgggatgatgaaaaagttctggaaacagtggtgatggttacacaatattgtgggtgtacttaatgccactgaaaggttcacttgtagatgttaaagtggtagcattttatgctatgtatattttaccacaataaaaagttcattcttaattaaaataaagattttgaatgcaaaaagcaaaggccatactgaaccatgcaaagaacactcagcctggggtctcactgttttgctcagagccctccagtggcttccccaaagtctgaaccctttggtagaaaataaatggcccaggggccaggcgcggtggcttatgcttgtaatcccagcaatttgggaggctgaggcgggaggatcacttgagtctaggagttcaagaccagcctgggcagcatggagaaaccctgtctctactaaaaatacaaaagttaactgggcgtggtgacgagcctgtagtcccagctacttgggaggctgaggtgggaggatcacttaagcctgggaggcagaggttgcagtgagctgagattgcgccactgcactccagcctgggtgaccgagtgagaccttgtctcaaaaaataataaaataaaataaaataaaataaaaagctctcttcagctgtgcccctgccattcctcagcccacctcaccggcatgcatcatgcccctgcactccacacacttgcttcatgttcttcccttacccgaagacttagtttgtgctgtttcctgagtctagagggcctctttcatctccttcagctggtgagctcctattcaactttcaaggtccacttcgaatgtccatgctcaggaagccccaatccattcaccttccctggggattcccatggcatgtagcacattctaaccaggctatgggctctctgagggcaggagccagttcattcactgccaaacactctggtccctgcctgacacagaagtgccaggctgaaggatctgttggatgtaaggaggagcttttgccaggcgcacactcctccatgcattccttctgagctgttccccctctttgaactttggcttccatctgtaaaatggagattcaattcctccacctaggcctttggtgagactcaggggaccatggatgttcaagtgccctcagattgcatatgccggggtgggacgggtggacggaatcatgggtgtgctgggaagagcccaggccttggagccggatgccctgctgggaacccgggtgaggtcagatggcatcctggccagaagagagggctgcatcccttgcaggtgagtctcagaatcccagggtggaggatgagtgaatgggggactaagggaggaacctcagcagctctcaggcagcaccctgggcaggtggcaggaatgggggtgccagcgggcaggacacggaactcactgtagggaatgggggagacctgaggaggagagttggggatgaagggagaaaaccatttggctagagccgaccccgggggctgtggcagtcagaccgcaggcctgtggccagtggggtgagacccaaaagaggagcagtgaggaaaaggggtactcctccgactgctagagttggagaagaccaagacttgtgctaaatagagctacccagagcctcgctgctcctacaccccacaggaaaccctgcaaaaaaaaaaaaatcaataattttctaccagaatgcaagagaacgacaaagcaggctctcaccccaggcctccattcaaaggaaggatgaacgaagagagagtggaaagacttacagagttcctagcatgttcccctcctgtaagatcccttcattcattcactcagcaacagacatttattgagcatctactatatagactagctccaggctctggggaaagttggaatcaaaacagacaaagcctcctgcggtctctcatgtttcctagagggcactgttcccacagatgctcctcagctccaccctaccttgatcagaggttctctcatgttcctgaaacttctggaaactcatgcagtcattcctcataccagctatgaggccctatgccatgcctgggacactgttttcacctggtacaggtgaggaagctgtgcccaaggtcacagagtcaggtgtagaacttcaacctgacaggtgccgaaatttactcctgacactacttgtcttctgcatccccggttgtgaagctgagaagaacgctttgggggccatggtttttttttttttttttttttttgtgagatggatcttgctctgtcacccaggctggagtgcagtggcaggatctcggctcactgcaagctccgcctcccgggttcacaccattctcctgcctcagtctcccaagtagctgggactacaggcgcccgccaccacgcccggctaattttttgtatttttggtagagacagggtttcaccgtgttagccaggatggtctcaatctcctgactttgtgatccgcccgcctaggcctcccaaaatgctgggattacgggcatgagccactgcaccgtgccctgggggccatgtttgtaagaccctgtctttcatctccacatcatctgggatggaattagggttatctcaagtctaatcaggatcattctagaacaggatgccttttaggtttcttggagccctcggccagcaagactcgactcttccttcctggctgtctcactgtggacgagttacttatcttccatgaacctcagttttcatccacgaaatggggatgataatagtaccaatctcataggattgtgatggtgattaagtgaaatcatgcataagcagcactggtgtactgcctggcgcacaggcagggacgctcagttgttctgggctgtctcatggttctgcagcagcagccaactctaagccttctttgccttaaaacccattattgtctctgtcctgtagatgggaaaactcaggccaggagccaggcctggcatcccagactcttaacctttggcagactggaccagccttccccctttcctggtacaatgaatggggaagagtgtggggtcctgaggcatcttgaggattctggagggccaattcacccctcttggtgaatatcacagaaccccaaggcctctgaaaccactgagtcccatgaagaaggttcagagatggggaggctgaggccacaacaggggagccatgcagtagagctatgtgcatgtttgtcttccccatttgaaagtgagctccctccttgaagtcagaggccatggagctggagttgtcccatctccatgctgggatgtgagccaggtgtgaatggatccttgtggccacatagagacatcggggaggctcacatatccaggaggaccccaaactctacatacacactctaaaacctgatcagaaccccaccactatcatttgcaatatcctagcaccctcaaagggtatagtgtgaggggtggggcagagaacctggtggtgcaggatgtacggggcagacacactacctctctccatcatcacatcctcctcatactcccctcccaggtgggacagggccaaagtgccattcaacacagggagaaatggagtggcactagagaagtaagggggctgttatacatgactatttccatagaaaaaccaagagaaagcatggagggagaaaaggagaaagtcaagagagaagaagcctcaggatttccagccactagagaaaactcattggcctggacaaatcccaacttcccccaactttcctgcaccctccccttaagtggcttccagtaagctaccaaaccctggtggcgcctgcacgccccagggcaagccagcctgaccttctcctcagagcctgagtcagggctttccccatctcagggcccatcccactgaactggaatttcaaggtcacttgtctgtctctgcctctggacctgaaggcaggggctgcatccagagcttcccagaataccccacaaggcttggcatagtgacaggcaaagtttggtgagccttgcgtaaatggaatcaagcctctcagtcccctttgtctgtgaaataagacatgtgggccaggagatgactgccatctcttccaaccttgagtgagaccccccaacatgtcaccatgacccattgtgtgtgtgctgcagggtcaggggaggtaccagtttcctcgatgtaaccaaaggccctcagggcctggtggacagtcctacacagtgggaggagttggtcatctggcctcagctgaccctggcttgtggttttcaagaacttaggaaaagaaaacccagcttggggagctgggcagagagcaggagtcccagcctggtggggctgcattagagtcaggtccctgcaatcccaccagggattccacgggtgctctcctgctgtcctctaatgcccaggagctcatggcggggtctgctttacttctaaggagactgaggcagaactgcaagcatctgccctatttgatgcacagagagagtgcaacttactggacttattgcaggagtcgcatccaacaagagagcgggtgagtggattggattccccaacactttctgcctttccacccattgtagtggaaggaggagaactcggtgggttcctgccctcctactaacctggctgtgggggtccatttccccttgggcctcagtttgctcatgtgctaaatggggtcagcagtgggcacagacagtgccaaggacacgtctcttccgcagtgagccacacgggacagagggtatattccagagctggtggcttgtcagacggcctcgccgcagtgtgggtgggctggatggaccatgttcgagggccccaggatgacgcggggggtggttgggccccaccggggacttgccacagggagattctgcctgccactcggtgagtcagctgctcctgggagccatgaccaggggcaggaaggccacaggccatgatgcaagggcgcttagtcattctccctgggggcgcctctggaggcagaggctatgccacccacagacccagagaagctccagagccgtgcacacgggtactcacccttgcacacctgaggctcgcacactgggggacacagacacaagtgccagaggacagacatgcctttcaccggactacacacaaaccctcggcctcgccctgaaacactcagatagcaggacgtggacccagagagaatgggcacggcacacaccgctcacattcatgctgtgcacacgctcacacaaacacctaagctggctcctgggtgcacttaaccatgtgggggcaacactgcaggagacaccagttcttcattcattcttccagccagcgaacatttgttaagcccaactgtacaaaacacttggaaggacataagccgtaacacaggaggcagggacttggcatgttctacctcctaggagaaggtccgcccagggaaggtgctccataaatactgggatagggaagatgagtggacacaggggccatgagcccggggcctcagcttgagcctggtcacaaagacacttgcttaccccctccctatttgcatcccagtcctgagcccagaacctgcattccaccatggccctgtaggacctctagccggctttgtgtcctgtgatggctccccactcaggacctgtgttagcctccagggaagccttttccacccaccttaccccagtttctcctggacaaaaatgcgtgtgggggtgaggagggaagacaaagggggtgaaggtgggcccagactgctaccagcacagaaactccaagagggtctttggaaattgtcaacactcctgcatttcatacagctaaaattcagaccccggagcagaacatacttctccaaggccatggaggagtagagaatgcaaaggtggaggctggggtgatctacaccgcaactgtgggccccggtccccacgtgtgccgcgctggacatcagtgtcatggtccaaacctcccacagcttcccagccttctctgttgtggccttcagagccctggagagccagttgttctgctctgacctgggtcaccaggtcctgtccctctacgaggtgcgtggggccaacatccatgctgggcctccagttcagaatgaaaatccactcttaaagaatctgctttaagaatccgatgaagcaagcactggctccctctctgcccccaatgtgcagcggcgccagtgcccagcagccttgaccaagcggtcccgagtacaagcggcgccttcaccgggaaagataggtacttggcagccggtggcccctcttaccccgcccgtatctcccagtgaccccctcctcaccaaaacggcaccctgggagccgcggagcgccacggtgacccttccaactgcctctggagtccaaatccgaaccggtccgcggccctgagtaccaccctacacaccccagccttggctcctcagagccttgcctctgcgtggctcttcctcgccgctgagccacaactcccttccattcctctctttcctcggcgctggctggtgcgggttggggtcaggtggagaagccgctctttgttaaggtgacagaacgtgctgggggtgggggccggggccagggccggtgcaactagggggccgctgccctttcctggacacagtggaagcttcttccgcatcaccaaatttttgtcatcctttctgagggacctgcttccaggcagcacgcaagttgttgtcccgggtttactccgcacccctctactgggtgaggaaggagcatcttgaatggagatgggggtgtccccggtttatacatctgcagagaagaggtgtgccgggctgcacctctggaggccgcggtaactgatattagagaagaccccggttgcagctgggaaggctcactggctggaaagaggtgcctcctccttccagcaaagggccctgtttggaagggctgcttctcacctgtctagtggcaccacaggacggtcggcttccactcgaattcccccggacggtatcatcacatagccgggtcctcgcagtgttggtttcccaatccgatgactgtcacctcggtgaggacctgtgctgatggccggagaaccctgcgctgcgggcgcacatggccaggtggcgcctggcaggcgacgtccgggtgcaggacggcgctcttaccgccccaccccaaaccgttgcctgggcctaggtccttcggcttcctgaacaggggtttggggggctaaggacgctgaggctccgggggcaggaagttctctctggttaagcgttctctcttctctccggcatacactcccctacccacccacctcgcctaccctcggggcgagaggctcaccaaggcagggcgcgccccccccatgaatcatcccaaggcctctgagccgcgggggctccgggcaactatccccctcctctcctggcctcaggcaccccagtccaggggtctgcagagaagcccgaagcccggacaaacgcgccggacgtcaacaacctctcatccctggcagcagcaaaggccaatatatttccatttcttatttcagtttgccaccaaaacaaagctgcgcgcggctgagggcaggaaggcgctgagaccgagaagaagggacgtcccggagaaagtgcgcccagctgatcttagaaaccagagtcctccgggacttcgccgagattttctgtagggcgttttaatctgttttcctactgcgtgccggcgtcgcagcgcgtgcggctcagggcttggtgactccggcttagcccggcggtcgcggcgaggttcctggcgcagccgcttggaacttcgcattagaatcgggaccgcgcaaatgccctggctgaagtgtcaccctattcaagaaacactgctgtcaggaacaaaatggggtccccggtgctccgaagtatcttctgaaattttcttaaaacaacttacaaaaaatgtttttgctttaacgttttacaacgtttaaggaaacatgtaaatggtctgtttctttatcgagatggtcgtcctaactaacagtgtacacatacataacaattcttccaactttcctcctcagagctaagcacttcactatatgtaaattataataaagaaaagattgtgcaagatcatgcaagtcgattgacttaaaatattgagttttaatccaggccctctgtttttctatttaacaacttttgtgtttggaccagactggtgaagcaggctatggaaattaacaaagtaaaaaattaaaagcatcttccttcgccatccctccctccaaaattaaacaacagtcgccccttcctgagcaggcttcagtcccaggctcgagttttcctgcgatcaccccacagtcacccacagcagctgttgctgcttctgtcgggttttcgtttctgccttctttgggtcgtctcttgtatacaaaacacaccccagttctctaactaaattcaaatacgaccccggcagaatttacacatttcgtggtgcatggattgtgtcggtgcaggggaaataaataccctctggtatttaaccactgagtctaattcgaaaaatcgggactgggcccctaggcggcaccccaggggctccaacctggcccgcgcctccccagaccttggcgctgagagcgctgcttttgcgggtgggtggacggagaggtaacaatctgctttcaacaaaaacctgtcgccaccgaatcgaaagcgaaagggaagggagaagaggggcagcttcccgcagcggccccgcgtctcgggacaggtagactaggaccagtacgcgccggctgcagctccggcggtcggatccggagtttgggggcgaggcgccggagtccctgccctgagtacagggaggctctctgcgtcgctgagaaacgtcggatctccaacccgacatgtctcctgtggcccaggcggcccgccctggactcgggcaaggaattcaggaggccaaagagcggacccagagtctggaggggagaatggtgaagtcttgggttgcaacagaagagggctcggtgggggctctttcgtaaaaacgcggtctccgcacccaaaggacactgcggagccgccttaatcgtcgttcttttagcacatttggggaaaggaaggcccaagttggggtagggacgcttgcagcccgggagggtttctctcaccaactctttccgcaacccggtccagacccggccagcagagactggaggcggcttccccgccccgcactccctcggcttggcccaggctcagctgcccggggcaccttccttgccgagaggcaattggactctgccgggagtgggcccagaagttgaggcccaggaagaggcctccgagcttcccccttttgttaggtgtagttacacacgtgaaagaacagctttcgccccgacctccagggctaggaatggttgccaggtctcagctgcctgcctgaagacggagatcagccagcgccagtactggcaccaaggccgcccctgcctccgactttcccaatgctcctgggagcgtctaaggatttttccttgaactccatttctccgcttttgagtatatacactctcacaactgtgggagagaatcgttgtcaatgcatgcctcagttttcctgcttgctggcagggtagggatcccactccagagtccctcctcctggctacttctgttaagggcagagcctcatcttttgtatcctcagtttctccatcttagacctaacgcgcctaatccctttcctagaaggaccagacatctcctggctggggagactcagctgctgagagagggaaagaacaaacactgacttgctgtttattgtttgtggctttgccccgagcagtgcctccatcttaggcagcatggagtggcgtcctgccggtagttacaggctgcctttggtcccagcctgcagtttatgacccagagcagtggcagggacttgccctgtcctcagaattgggtgctctcgagttcccagcggctcggagatagatagggatggaaatgtgggtgggggttgggaggggcaggggtagcgggggctcttgctcttgcctcttgctgtctctgcagaggcacatttatgacccagtaaggcctttctgttatcaccccaggatgcagatgaggaaaccggggtttgggaaggtgtttgctgtcaggtcacactgccacgggttaggggcagtagcgggtcaagtggctggccctttccgtcagctccaaaggctagtgcaagtagaggaagggccaggctggctgtgggggcccagcaggacacagagagagggctcaggggaggccaggcctctccgccttccctctggacctgaaggcatttaaccaagaggtggggagctccttaggctctcttcttgcctaatgtatcagcctcttcagaggtctcactggtaattttcattaaaatatgaaaattcaatgcagtggagagagagcatgagctctctggctatgcaggatgaacctccatgggtcccctagtctgcgacctgccctcacctaatagtcctgaatgacagggacgagctggggcctgcatccctgggctgggaaggacagccagtacggacagggctgagagtctctgctggcttagcacggaaagagtgcctgtatgagagctgtgtgtgtccatgtgcggagctgtgtgtgtctgtgtgtggagctgtgtgtgtccatgtgtggagctgtgtgtgtccgtgtgtggagctgtgggtgtccgtgtgtggagctgtgggtgtctgtgtgtggagcagtgggtgtctgtgtgtggaactgtgtgtgcctgcatgtggagctgtgggtgtctgtgtgtggagccttgggggtctgtgatctgaatgcctgatctcattccaactggaggtgaagaggaaggtggaggaagtggggaagggccactgaatctttctaaatcttctctcagttctgtcctatgggtttgggagtatgtggctcattcgaggccacatgggcatgtgttcttggggtatgaccacatcggctcctaaagaagatgctctctgcgtgtgtgtgtgtagagtgcaattgtagacaagcatatgactgtgaatgtttgtcagcagccatctatgaactagttctgcgcctgtgaaagaaggaacctgaatacgagaaaatatctgccatcggctgttttcccaaagttattctagccaccaaggcctccgccgtgtcccagcctctgtccccaggcctagtgcctctccatcagcctggatcagggcaaattccctgcccccaactcttcccaccagggccggacctgaaggccaaggcctccgggtatgtgctcaggactcctggcccagagaaggtttttccctttctgcgtctttgcttccccttccgctttggggttcaggaaccccgattctctggaagaagagaaggcctaggctactgagctgctctggctagagacgtccttgagtgtctctctctcccgggcaatggtggctgtgctctggggggcccaggcctgcctcctgtggctgcgttcaaggcagcttggaggtcatttaggccagctcccccgggttccccgtgggctcaaatcaggacccagacccttctctcttgccacagctctgggccacctgggactcgggacttcctgtctcccttcctactctgtcctaaaccattgttcagaggcctgccgcctccaagaatcgccgagggagaagctccaggggaactggcctgcccgcatccccactgccagtagcgctcagggtcccaggactcgggtcttgccagaccacagtgtcccctgggaccctagggtctctggctccgcactgtgttgcgccagtgcgcctggatttcccgtgagctttcggccaaccacgctccgggcttcccgcctggctccgcacctgcggcgctctcacctgcggcggcgccgcccgaggagcctcccagccggcgaggagcgaggcttctgcagtcctgctgtcccgcagccccgcagccccgcagcctcgcagccccgcagccccgcagccccgcagccccgcagccccgcagcccagcgccagagcgctgcgcggagactccttgccgccgcacgccctgggccggtaagaagcatccgcttcaaatcccgcccagcgggcagcgcaaagcgagcggtttggggaaatgccgaagggaccgggaaaaacaaactccaagtcgagtttaacagccgaaacgctccgtgcctaggccggcggacaagaaggagacagaacagatcccttggctccctcgcagcgatcgatcccgtttaccgaccagagtcaccaccccgcccccagcccgccaactcatacctcccgcaagccaccagtttcaagggatgcggaagccaagcaccccgtggtccccagcaccaggtgacccgcacgtgcactcaccgtagcagggaacctgcaaggccgcgctgtggccgctgctgccttcctggagtttgaggctgccgtccgggggcgtcttgcaggcgcctcgctgcaagtaaagatgcggttgcgcgggcggctggggctgcggctgctgctgctgcggctgcggctgcggcggcggctggggctgcggggtcgacggctggggctggaacttgttaaaggagccccgcgccccagctccactctccaggggtgtcgccaggtcctgctgcccagcgccgtaacgggcccggctcttggcgtccccgaatccctgtgctttggcggcggccgacaggaaagttgtgccgaacttgtcgcctccgggaaatgccctaaaaggcgacgagccctcccgactctgcgacaccgggctgtagtaggcgtccatggcagcggccggcgactcgcagtaagagacgcaagtctcagcattcatgcctggcttgcgcaggcggcgggcggggacgcgagcgagggcgcgaggacgccaccgcgcgccttggctgggagtttggggaggcgaggaggctgtggctgtgcactccttgcccggcctgctcgctctccctcctcccctccacgccggcctctctctctctccccctcttctttctctgtctctctcctctctctccctcctctctctctcttcccctccctcccccccccttcctctctctctccctctctctctttcctccctccccacagctagccgagggaaagaacggagggcagtaaaaagattcagatgtttcggaaagttgaccagatctcccaaaccctcttaaggttttgcagcggaaaaaaaaaataagtaaatttttttccctgccttgcttcttcctttccccctctctcgtcccctcctcctctctccttccactggcccctgccccctcctctccactcttaaggagatgctactaactcgctagcggggattcaacccggaggcgcccgagggcttttccgattctaggcggggctggggagatgccaggatccccagggctcccgaggctaggctgagaattggcggggtgtcggagctttgccttagggcaaagggaaatgcaaattttaatgacaggttaaaaaaaagccccccaaaataaacctaacaggttttgacattcgaagccagggggaccacgggcctgcggatgcaagcgagtcctacggactcctgcgcgcgagctcgcgggcgccgctgcgggccttcccgctggcaccttttcctaggtttccaaccttcctccccattcccgttcctacgggagattaacacacacacaagccttcgtcgtccagtgcatggtcacttgcacgtcttgttaactatttccctctgctgtaagggcgctgggctgggatgtagcggaatctgtgctccctcaagccctggagaagccctgggctgggcccggcttcagaagctttagagcgctgccctctgcgctcccgtctagaggccgcaccgttcacgccccacgtctgcgcccaggcgaggggatttcctgccaggcgaagtacagagagcggactctggagaccccctgaccttgcccgatagtcgcgctgtcacctgttcactccttggggtcaggggtcggggagaggggtgagaccgtctcttccctttctggcctcactgcccccgactgtaaaacgaactgcttggttttgataggttgtggtttcaccaccactgcgagcctcaaggcccctggcaccgccacagcaagggaaaaaactttgcgcgtgcagcccctcgatttcgcttcatgacaaccgtgctagagattggcgcccccaattttctgatgagctaacggaggctcagagaggggcggccacctggtccaggtcacacagctgggaaatagccgtcgcgccctggaacctctgctcaggctagtccctccaccgacctggaaggccgtgcggacagcgtagatgcagaggggaaactggcccccggctgtggaatggttcaagttgaaggagaccagcgagagcagccttccttaaaccgctgagaaaatcgttaagcgagaacgtacctctagggagtctgggagtagggtgagaggtaaaagtgcaaggtaaaattaaagagggcctgagcaccgtgaaccaaggaatgtgggtcagatgtcaactttctgcatctaaggtctcccaaagaaaaaatatacctggggggtcgcgcttctgctcccaatctcatctgggctaattcttacccccaccctacccccttagtatctctggtccttgctccgccgccgaccgcgcgatcccacatctggtttccatcgccggcttaccttgaagtgctcgttaataaagatattccgcaaaccaagccaggagcgcgcaggctccagccgccccccactccatgcccaatgggaaccgcgcctcactggcccgcagacctaagccacttgagagtcctttatttattgagctcctgttgtgccaacaatctggcaatacaaggcttatcatacccattttgcatatgggtagactgagactcaaccaaaataattttccagttagcaaaaagcggagtgctcctgccatcatcctaaatgctcctgtccagcggtttcttcaagttcctagaacctgccaaggtctctagcctgtgcactgtagcataggtggtttcccctacctggaattccctaaactcattcctgcacttttgtctggctaatgattcagagttcagcctagagcatcttcctctaggaagacttcccgtctctcctagtttaagttgacgcttccgtttgcctcatctccgtcccagatctcgtggttgtctggttgcctggctatgagtgtatctcaaccccactagttgccccagggcagcctcctacgtgcctggcaccccacaaatatttgtggaataaaagattaaacctggaccaggcgcggtggctcacacctgtaatcccagcactttaggaggccaaggaggatggatcacaaggtcaggagatcgacaccatcctggctaacacggtgaaaccctgtctctactaaaaatacaaaaattagccagacgtgatggcagacgcatgtagtcccagctacttgggaggctgaggcaggagaatggcgtgaaccagggaggcagagcttgcagtgagccgagtttgtgccactgcactccagcatgggcgacagggcgacagggtgagactccgtctcaaaaaaaaaaataaataaataaaaataaaataaaataaagattaaacctggggctgtaggactctatcacctcagtgtattccaactgctcagtgcagcaccaagttctgagactctttctttggtttcccttagtcaaggacagctggtcacccacccaccccctcttcaaaaatcaagtagcggaattaacagcgtgctggaccttc

SEQ ID NO: 2 - DNA, 221909 bp, Homo Sapiens
aaaaccccgtctctactaaaaatacaaaaattagccggttgtggtggcgtgtgcctgtaatcccagctacttgggaggctgaggcaagagaattgcttgaatccgggaggtggacgttgtagtgagctgagatcatgccactgcactctagcctgggtgacagagggagactctgtctcataaataaataaataaaccaggtgcggtggctcacacctgtaatcccagcactttgggaggctgaggcggggggatcacctcaggttaggagtttgagaccagcctggccaacatggtgaaaccctgtctctactaaaaaagaaaaaaattacaaaaaaaaaaaaattagccaggtgtggcgggcacctgtaatctcagctactcaagaggctgaggctggagaatcacttgaacctgggaggcagaggttgcagtgagctgagatcgcaccattgcactccagcctcggcgacgagggcaaaactccctctcaaaaaataaaaaataaaaataaataaataaaaacaaaatttgaggcttaaacaattaagcttcgtgcatctctttaatttttcttttttttttttaactctaatttcatgacagattaagcttcatgcatctcaaaaatgtgtagaaccctcattcccagccttccctccctctctcttgtccttctttctgatttcttggaatcggaaggaaaattcggatatccaggaaccatcacacaggaggcacccatgtgatgtgtccaacatcactccacgcaggtgtccttgggtcctgggtgcccaggttcctgtgaattgtgaccccaggcagaagcgtgagcatccgcagaggaacccacctacccaaagccagggaacagccagggctggcatcctcagggtgactgtgctccagggcacctctgacttgtgctgagtaaaatggacaaagccagcaatgcacccataacccagattcttgagacaccgctggactttgggaatcccaggcattaggctcgtggcagtgtcatcatggctaggctgggggcagtgtcatcatggtgcttgctggccaagtcaggacacggcctaagccggaatctgctggtgctggtacaagcggtgagtgggcgtgtgggtgggggttgcggttagggtgtggacatcccagaatccaggacgctgttcacaattcgtccatactccctgctcccctcccttacagcacttccctcccgaggcctcctgagcctctaacccccagataaggaaaggggtggactcagttgaagtccagtgtccactccggtccaatcagctctacctggggtgaggggaaactcctctggctgggctgctccctctgcagggctgtggctggacagattactcaagaaaggaagcaggtgggccggaacgaacccacggtgccacataggcctccgttctcatgcatataagtttcccacactcaggcaggaaatgaaaatgcttcttggacccccaaggagagtaaaggagaggggaagaggaggaggatttttcggggctgttagtgacactttcagcctcctgtgcatttttgggagggctgcaggagaaggcaatgctgcgcccctacccagaactagcgagcgcttcccaactggcctcccgccttcctctcgtcctctacggcctccattggcagctgtgcaagggcccggccctgcctctgtctctccacactcgctgtgatacctcaggcctcccaggctccgccacgcccttccctctttcgggaacagctgccttccatcaccttggctgcctggctaattcctgctcattccttaaaaccctgttttgatttcgcctcaataaaactctgacaccaccctccagtcataattagtcacttcttcctctgtacgttggaaacaccgctttatcgtggagactttaaggatatccaagtagagagaattcttccgtgcaagttttgcatcctctcaccactgcctgcgttacccgagttgtaaagggcggctccctgtgtctgccccgctgcaccgatacaccgagctgcgcacggtgcccagcgcagggagaacaaatgatcatctgtccaacgcgcccatttacaggtgaggaaactaaggctccaactcaatcgacgcactctgcccttttgattaccagaaaagtagcaggacaggtgtcctgtcccgccctaccccggcccactaagccggcaccccggctccgacccccggctgtgcccggcgccgccgcggtgcccggcgccgccgcctcgcccggcggggccgcccggagcgcccgcacctccgcccgcttccacctggccgggcccgccccgcccggactcgggactgggaagtgcggcgactcccggaaccagccattggcgccagcgcggggagctgggggtgcagagctgcgggcgcggcgggccacgcaggcggcccccacccccggcctggcctggtctggtctggtctgcgctgccgcgcgggggcgccccctcccaggcccggcgcccgccagccccgctccgccaggtgcagcgcagcgcaggggtgggcgggggtggggctcggcgcgcacgttcacggggcggggagggggcgggtcaggggcgggaccacagccggctgggccggggttctatgcgcatctccggggaggggcggggcgggggcggggccggggcggggcccggtcggtgcactccagacggcgggccgccccctcttcccgccttcctactaccggcccaggattagcgccctgggagcgcgcgccccgctgcctcgccgccacactttcctgggagcggcggccacggaggcaccatgaagaagtcttactcaggtgggcttcgcgcccggggtggggaggggtcggtgtcccgggaccagcgctgctcacctgagtgcctgcggccgggagtggcgaggcgcccccggagctgagcgagtccccgcggcgggcacactgcaggtcgagttcctcccaggacagggccgctgtcgggccgctttcgacctgagccgaccgtcccctgcgctgtctccagcccttgctcgagtgtcggaggggctgccctgggggacgctccctcttcctcgccccttgcaccctcgcaggaatcgctgactttccaggtcggccgggtgctttgggtccctgtgcgtctgtgtgggtgaatggggtcggggctaggtggaggggtgtccttgggttcagcctctagggctggtggtccaggccgcagcatcctttcttcggattctcttcggtttctcctctacttagtggggcacgggacggcctccagatgggaccgtccagcagcgcccaaacttggcgactcgggttcacgttttgcgctcaggacgccgcccgcggctgacatcctcactccaccctagcagggcccgccttaagtaggcgaagggggcctgacttgggcctcaccatgagccggttcaggagctttcatttcataagaggctcccgctctggcactctgaagttccatttcacagatgggcacaccgaggccacaagggcaggttaagagaaatccagatcttcattatttgtcttttccttccttttttttttcctttgtggttttctccaaaggatccaggcaggcaggatcctttgtcctcctcagtcctcaaattataaatagcgtctcctcttctaaatctagaaaccgtttgtttaatgtccctcctttaattcattcagatagaaaggtacctgccaaggatccatgaattaatttttattgataggagaacagaatcatgggccttagttggaggtgaaggagtcatcggggccatccccctgcctttgggccattgtcggtttcctctggctttccatatttaggaaccaaaatgagtgataaagtaccttgtctcaaagaggattactcagaacttccccgaaaatacccttctgggtcagtagcttagaatttcaactttcacccggttgttgcgaacaagatggccctctacgcacccggagcacagctctgtcaggagcgtgggtgggttggtgtgctggtgggcgggagcgggcttccaggtggcacatgcttggttttggcaccggggcttcctccccaacatgctccaaatacttgagattgttgtggggatcgcgcggtgcatggccctttccaggggatctctagcccgcccagggagggccctttgcccttggtttcttacactttacctcccactggtgggtccagacagtgggggtgaccggggtcctcccaggtcgtgggtcctgggttttttctgcggagaccctcctgcacagatgccggaagggccctgaggcaggcttggagtctctgcacctgcggcttactgggaggtggggagaccatcacttgtccttttctcctctcctccacacacacctaccccacccctcactgggtttcttttttttttttttttttaaaaaaaaggacagaaccttttgcagtaggtggaagtagagtttgtggagtgagcaggaaccaactcttgtacagcagcctcggtgcctccttgtgtttacctaaaggggcaggcccctctgaggatgggggaagggagggctcagaccatttctggtttgctccctgcttggcagtggcccaaggtgtgctgggtcactgtgttgcagttgtatggagtgggactggagggggctgatggtgggggtggcctcttgccctcattctgagtgtcctggagctgtcttggcaccagcccttttccgggtacgggcactcgcaggagtcaggctgaccccccaacaagccatcgacaccatgaaattaaggaaagcagcaaaagatgttaaaaatcccccaaggctctgacaatccaaggacaacaggaaggtctttattttttcatctagactgtgcgggattattgcttccagacctgtatgtgggcttcagaataaacggaatgaccataatgttgttcccggtagacctggtttgaacattcgtgagcctctgaaaaggagaaagattttagaaggatgtgttggggcaatctcaagtaccgtgggtctatagacagtcatcgaagacactttatgtgctgggcacacatggccaagtctgagtgggtacagaaatggtaatgagatatagtccttgcctgcagagaacttacattctcaccgggagtcaggatgagggcgagacaccagctcattaacacccttccctcctgagcagttcagcctccaaatactacaggaatgccccggaggttttaggtggaggtgagattgagctgggccttgaggaaggagaagtcttgagtagtggagaataaaaagggacttggccaggtgcgcttgaagtcccagctactcaggaggctgagacacgaggatcgcttgagcccaggaggctactcaggaggctgagacacgaggatcgcttgagcccaggaggctactcaggaggctgagacaggaggatcgcttgaagccaggagttcaaggctgcagccctgtgacagcgcctggaaatagacacggcactccagcctgggtggcgtcatgagaccccatctgtaagaaggtcttttccaatgcggaaggcagcaagggcccacacagggcagctgcaggatccagggggacactggggacaggttctctctggcagctccactgctgctccaggctttcccgattgcctcacccggccttccaatggggtggaggtagtggtagtctacaggcagtgtggtccagtggttacacttgggggctcagagccgccagccccttgggattaaatctcaccaggctgcgcctctccctgtggcacaaggttctcacctcatgcatctcatttgcctcatttgtttttttgtgtgtgtggtgttttttaattttatttatttatttatttttgagacggagtctcactctgtctcccaggctggagtgcaatggcatgatctcagcttactgcaacctccgcctcccaggttcaagtgattctcctgcctcagcctcctgagtggctgggattgtaggaacgtgccactgcgcccagctaatttttatatttttactagagatggggtttcaccatgttggtcaggctgatctcgaactcctgacctcgtgatctgcctgccttggcctcccaaagtgctgtgattacaggcatgagccaccacgcccagcctgcctcatttgttaaatgggacagtgctatgttgttgtaaaggttaaacgagttcatatttgaaaaagctgagaaatgcctgctctgtaacctgttagctgctgtcatgatcatgattgtcattgacaggaggatggagaaggctggggttacgccattgctaggacgttccagaagcctccatgatcttcccttactgtggtcagagcatggtgcagggtctctcccccagcccctcagcactggagccagctgcactgtacccgccctggctctctaggttctgagttttgggactccctttgcatactaggtcacatggaacttgccgtcattcccaggctcccctggaaactctctgtgggtggcagcggcaggaggacttacccgaggccgatgagccacagaagcgggactgaggttgcgtcacacccctactggcacctgggaattactctggagattctttttttattttttatttttttgagatggagtcttgctctgttgcccaggctggagtgcagtggcacgatctcggttcactgcaacctctgcctcccaggttcaagcaattctcatgcctcagcctcctgagtagctgggattacaggcatgtgccaccgtgcccagctaatttttgtattttttagtagagatggggttttaccatactggccaggctggtctcgaactccggacctcaggtgatccacccgcctcagcctcccaaagtgctgggatcacaggcatgagccaccgtgcccagccactctggagtttctctgtggctttcaggagattcctgaaggggcaccagccacgattaaaaagctctatgctgtcgtgacttctgagtcctgggcagggagggaggctgcacccacacaggaagcagcttctgccgtgattcagtgtgctggctcgccgtggtggacagggctgcaccctcacccagcgccccgggagctgacttacgggaagggcaaggaattgcaccctcagagaacacttccccagtcagctaacccggtgacaggcgagcgtgggaagggcacaagcacagggtttcttcctcttctcccccagccccgtctccgcgcctgttctcgctgcctcttgcctcctcacgtccaagcttgtctgctctggcgcattcaggggacctggactggagagaaaaagccacctcgtacggttagtctgtggctctgtctgacttgtgtcctccgccgaggcccctcagttgtgagacagctggctgagcctaagtcctggggccagccctctccctagtctgttgcaaaggtagaaaggcatgcccaggcaggggccacctgccctgcccgctcacgccagaccgcaggcacttgcccgtcagatctccccggcctgcccagagggattctgatagccgagggcaatgcacctggcagcggagcattgcgtttgcgacagtccaccttcttcctggaaccaccccccacaagtgtgaccagctcaagccaggacaggtacagggggacccaggattgccacttaggggcagtggtctggaatccaggtccaggtgacatgggagccaaccctctgcttggagatcccaggtgggtgtttgcagaggacatctcacttgaggacccatggaaggggacacttcccaccccctacctggtccttgggctgccctcctctgacactctcctgccatcccaggcagccctgacagccccatgtgactgggacctagaggtggcccctgtttccgccccagtgtttgtccacaggcagtgttgcgtgggctctgaagtttgcctaagatggacctgataaggggagttcagtacacatcagtgcaggcccggccagggggtgatgatggcagttcctgggcagatccagctggctttagggtaggaggggctccagagagaggctccaggcccctaggggtgtgaacctttggggtgaggcgggaagtgacgcgctgggttcctgcgcctctgtttgttggagctattaccttggaaacatcccagctctaggcggttgccagggatttatggggatcagtgggtgccaatccctgggtgaagccctcggggcttgtacacagcacacagcgctgtggccccatggctcactttgctgtgtgaagtggctcagtctccgggagagtccttagccaggcaggcctgacggcaactgccaggtcatggtgatctggaatcgctgaccaaagggagtcagtcctggtgggtggagggacttggtgggcagccatcgtgatgccaggcatggggatcgtgtgtcacccaggcctgtgggtgccgagcttctgtgggagcagtgaagtgcccccgtggccgatgggctggtcacccctgcccctttcctgatgtgacagttgtgcctgggccccgggaaatttgccaggaggcctggcattggcctgctctactggagcggccctgctgagctgtgagctgcccgtctccctgaggttcctagcccatttcaactctccatgtggatttggtcattcattccagaagcgtctgccgggcgctgctgagtgtcaggttctgtttgcctcctctcctgtacgctggaggctctgggcaccagctctgcagggtggcctggccttgggtctccagggtagagcatggcactctctgctcccagcccagtttctctctgctttatctccctgaccccaccctgggcatgggcccatttgcagcccctgtgaagggagacattgagctgttgctggcagaggaggggcggctcctgggcactgcttgccaatggcctctcggcagctctgtgacagctgagctttgttcccagcctaatctgacctggttctccaaagcatgactgttggcagcctgaaaacctccaggacaggaaacaggagtggcgcagggaatgtaagatgatcccagcttcaagtcactgggcggcccttagacccaggctgcctgctgtctctggcaggaactcaagtcgctggtcatcctcagagcggtgttggcccggggccttcagtggcctttgtgtctgggtgagaggaaccctggatggccactctgccctgagtgtgtgggtccccagaagtgctgggttagggggcacggagggccagaaagtcccctttggagcgctggactctctcgctgactcctaccccaccccggcctggggtttcagagaaggggtccaggcaggagtgtcatcttttctcaatggggatgtggcttcagtctctgtccaggtgggtgcattgctctctttccggctcctcccaggctgcttaaatgacctgtgacgaggcctgcgccatggccggggccctctgcttttcccagcgctgcacctgggaaccaggggttgggccccggaagccgaggatgtccctgaatgccatgcctgggcacctgtcctggccaggcgaggcgtgttggggcagcggctgagatgggagcagcagcattgcctgccaggtttgagatgggccccgggtgagtgtggttaccaggaagggctgggcagagcaggcgggtgggccgcccctggggccttgttccgcagatcaacctgatccgcaccctggggccggggcttcctttcacagccttcccatgaactatggctcctgtttccatcccaaatcagatcccagaagaggaataatgtccatgtaacccaagccagttggaagtgggttacatccaacccctgtcatcttccagcttgttaaggacttgactaactcaacccagagggatttggagggttgtctgcaaaacccactaataacagggaactttagctctgtagccacagggtctacagaggtgtcgggctgtcgggttattgctgggaggtgagccggtggcgtagacaccatggaggcaccggtagtggaagagctgcaagtgcacacagaggccggcaccgaggggcggggaggaggaggtggtggatttctcgccagtgttggcatcatgttgcctccagcatcagagacccaaggtgtggctgaccttggctggggcgatgagtcattggatagcagagccttcctggtagctgggggttaacgctttaactgccgggactttgtattatgccgcttcttttttttgttttgtttggtttggtttggtttggtttttgagacggagtctcactctgtcacccaggctggagtgtggtggctcaatcttggctcactgcaacctctgcctcctgggttcaagcaattctcctgcctcagcctcctgaatagctgggattacaggcacgcgccaccatgcctggctaatttttgtatttttagtagagatggggtttcgccatgttggccgggttggtttcaaactcctgacctcaggtgatccacctgccccggcctcccaaagtgctgggattacaggcatgagctaccgcgcccagcttgcatttatgcttttttttttttttttttgagatggagtttcgctcttgttgcccaggctggagtgcaaaggcgcgatctcagctcactgcaacctccacctcccgggttcaagcgattctcttgcctcagcctcccaagtagctgggattacaggcctgcgtcaccatgcccggctaattttgtatttttagtacagacggggtgtccccatgttggtcaggctggtctcgaactcccgacctcaggtgatccgcccgccttggcctcccaaagtgctgggattacaggcgtgagccaccgcacccggcctatgctttttattattattatttaattttttaaggaaagcaatctaaactgtacactgtatcttttctttctcttttgctttttgttgtcagttttctgtattacttattgccaaacaacatgaacaggaaattgaaaggaaaacttcaacaatcattggctgtagcatttcttctgtgttccattcagtgcttgtctcctcaggaacatgacatagggtttgatttaattatgaaaggcgtatattttcagagttttatactccccatagaatgaatgttgaattctgttcttttcacttgaaattagatctcaggcatggatttcatgattatcactataatggctcttcagagtggacattgcatcttgtagggaaccaccctctccccagctgctggtgtggacgctcctccttgatggtgtgggtctgggcccctgaagggtggtgtcctgagtaaagatgttacagtagccatgcttatagctttgggcctggggctaggtggagactggcttcaaccctagagcttgctgtcttaaaataaattcttttttttttttttttgagatggagtctcgctctgttgcccaggctggagtgcagtggcgcgatctccgctcactgcaagctccgcctcccgggttcacaccattctcctgcctcagcatcccgcatagctgggactacaggcacccgcccccacgcccggctaattttttgtatttttttagtagaggcggggtttcaccatgttagccaggatggtctcaatcttctgacctcgtgatccactcgcctcagcctccaaagtgctgggataaaataaattcttagggccgggagcggtggctcacacctgtaatcccagcactttgagaggccgaggcgggcagatcacaaggtcagaagatcgagaccatggtgaaaccccgtctctactaaaaatacaaaaaattagctgggtgcagtggcgggcgcctgtagtcccagctactcgggaggctgaggcaggagaatggcatgaacccggaaggcggagcttgcagtgagccgagattgcgccagtgcactccagcctgggcgacagagtgagaccctgtctcataaataaataaataaataaataaataaataaattcttatacccacttgcattatttattattattattattaaacagggtcttgctgtgttgcccaggttggagtgcagtggcgtgatcatgacctcccagtctcgacctcccagtttcaattggtcctcccttctcagcctcctgagtagctgggactacaggtgtgcgctgcatgcctggctaattttttttttttttttttttttgagacagagtcttactctgttgcccaggctggagtgccgtggtgcaatctcggctcactgcaacccccggctcctggattaaagcaattctcctgcctcagcctcctgaatagctgcgattacaggcatgtgccgccacacctggctaatttttgtatttttagtagggacggggtttcaccatgttggtcaggctggtctcaaactcctgacctcgtgatccacctgccttggcctcccaaagtgctgggattacaggtgggagccaccgcgcctggcatgcctggctaatttttaaaaaatttttgtagcagccgggcgcggtggctcatgcctgtaatcctagcactttgggaggccaaggaggtcgggagttcgagaccagcctgaccaacatggagaaaccctgtctctactaaaactacaaaattagctgggcatggtggcacatgcctgtaatcccagctactcaggaggctgaggcaggagaattgcttgaatctaggaggcgggggttgcagtgagctgagatcgtgccacggcactccagcctgggcaaagagagtgaaactccgtctcaaaaaatttttgtttttgtttttgtagcgacagggtcttgttttgttgttgcctaggctggtactgaatttccagcctcaagcgatcctcctgcctcagcctcccaaagcgctgggagtacaggcgtgagtcactgtgcctggcctccacttgctttggctgcctttctctgtcttaggtaaccatacatttctccaggtaattaagaaaagattgcgcatgatgagtcccttttctggtatttctgggattgcccccaaaaccagacaagtgttcttaccttgacattttattaagactttaatgaacagaatgccgtttgccctcagtctgctggtccccctgcgaaggcccagggcttccttgtttgaaaagtcatccccttgtcgaggtctttgattccttttcaccacggcagtcatgccgagggtccacagagccaccccttccccatctcttcctcggcccctcaagacgcatctgtacccccggagatgtctctttgttttcttgggccacctctcctggccgtcactcaccctgctgactcattacttgtgcaacagtttcttctggaaccctcaggctcctgccacctaccctctgcagtccccgttttgttcctcttgcctcagtcttcctccccatcacccctctacctgttggtctccatctctgtctatggcacatccctgtgttatactctgatggctggataaaggttgagtgaaacgcatctacccctttggtgactggggtgcccattaatcagaagggatccaaggctggcgtagccttttcccgcatcctggggtatcgtcctgtggctcttccttgttggagtctgcagttttttgtttttttttttttaaattttttgagatggagtctcgctctgtcgcccaggctggagtgcagtggtgagatcccagctcactgcaacctccgcctcccgggttcaaccaattctcctgcttcagcctcccaagtagctgggactacaggcgcccgccaccatgcctggccaattttggtatttttagtagagacggggtttccctacattggccgggctggtctcgaactcttgacctcaggtgataggctcgcgtcggcctcccaaagtgctgagattacgggcatgagccaccaggcccggccgttgagattaccttcataagccaccaggcctggctgtagttggcagtttttgaccactggtctcgctccacgtgatctgtgatcttccccttggccccctggccctgccctgttcatctgctcacctttctcatgcatgcggtttgttcatagggtatgtaatggggtctaaccaggaaatggaaaccgcttgagcatttatttatttatttatttatttatttatttatttatttttcccaagacaaggtctcactctgtcacgcaagctgaagtgcagtggtgtgatcacagctcatggcagccttgaactcctgagctcaagcgatcctcccttctcagcctcccaagtagctcggactataggtgcacactatatgcctgcctaattttttcttttatttttgtagagacagggtcttgctttgttgcccaggctggtcctgaactcccaacctcaagcaatcctcctgcctcagcctcccaaagtactggagctacaggcatgtgccatcacgccttgctaatttttgtattttttgtgtgtgtgtaaagacaaggtcttactatgttgcccaggttggtcttgtactcctgggtttatgtgatcctcctgcctgggcctcccaaagtgctgggattacaggcgggagccacagtgcctggtccacttgagcatttagaacagaaggacttaaaggcggggaactagttacacagatgatgggagaggtgaaggccagacagggaacagagaggcaatcagcaggaaatcaaagtggtgtgggcttatacagccctctaaaggtatggatgcaatgattcatttagaatgagaaaataaataacagcaaattataaattataagcagctgttaaatatcacaaacatcactacatgcagaagagtaccagtcaactgtcagtcatatctccaaagttctatttctcccacatttttggcattacttcttcaatatgatgactttgtaatatcgttttctatttcgagaacagaaaactgatcaggctggacacagtggctcgtgcctgtaatcccagcactttgggaggccaaggcaggtggatcacttgaggccaggagttcaagaccggtccgggcagcgtggcgaaaccccgtctctactaaaaatacaaaaactagcagggcatggtggcatacacctgtagtcccagttacttaggaggctgaggtgggaggattgcttgagcccaggaggtcgaggctgcagtgagccgtgatcatgccactgcactccagcctgggtgagagagtgagaccatgtctcaaaaaaaaaaaaaaaacaacaaaaaaaaacataggctgggcgtggtggctcacgcctgtaattccagcactgtgggaggttgagatgggcggatcacttgaggtcaggagtttgaaaccagcctggtcaacatggtgaaaccccatctctaccaaaaacataaaaaattagccaggtgtgatgacgcacgcctgtaatcccagctacttgggaggctgaggcaggagaatggcttgaacccaggaggcagaggttgcagtgggccaagatcgtgccattgcactccagcctgggcaacagagtgagactccatctcaaaaataaataaataaataaagcgaatgaatctccttagttgatcaaattttgtttttatttttggtagttgggatgtatacaaaagtggcggtcaacatggagttggtggtgctgctacaattgttttgttcaagatacacaggaattctggtaaatcctgtttttttctttttttttaaatgtgattcccatcaagaaagaagtaggaaaatgggggagatttctaactgcatatgaggcatttgtgcatgtatttctgaccagagagacttttctgttttgactccacattgaaggaactgaatcctttgcttacaacttcacctctggtgatgggagtaattttccacagatttgcttctggacccgtgcatttcaaatcttgcttctctccactgcgcacgtttttccggcgccaggcaccgcaggatatgttcgtgtcttgtgatttttgattctgcgcggtaggtggaattggaacggtgagtggagcgagtattgctggaatccgtttccacaccgggatagcgagcagtaactgaactatacatggaaataaatgggaactacataaatataacccgaccaaagccaaactaaatatctttccagttcaacttctccttagcaggagcccccacgtggcagcaagcctccgtttccacctcacacaagagaaaatgtgacgggcaggaactcaagactggaaatgaacggggacgttaattgattgtagggaaaatattttccattttgtaaattttacaaaaaatgtttgaccctgtggacatgtggttagggcccttctcagtgccttgagagggaaccatgcaggtagagggagggttcttagcattgtgggggtgacctggagattggcagcagggtgccaccaccacccctaggtggggatgagagggaggaagtcctgtgaccagagtccaggggccagagtcacctgctgggagcccaaacaaaggtgggactctggcaggagctggaactacacagaggaccacctctcctgctggagaagctgtctgaggcagaggaggtggagagctcccgcgccctcccttgcttccacctcccaggttcctcccaagcctctcgttggttgaacccagcccaaagccagcaggcctggggacctggacacctgagccagcagaggtcggcgtttctcccacacaaaggagggcacaagaagtgggaggcacggagggggatcaggccaggacccacacaggatgtgcaaacaggagctcccctctcttcccaccccaaatggcatctgcagccggcctcacttccctgctgttagacaggaagaggaaccttgttcccggcaccagctgcccccaccgccccccaccccacggaggcccctttcctctctggcctttgcttgcaatcattggcgacgctgatggaccatatcttctggggagtttggtcatgaacatggtttcccatttgttgtggaccaaactgtgcccttccccttgaattcctgcgttgaagccctaactcccaatgcagctgtaattgaagatagggcttttagggaggtaattaaggttaaatgaagtcatagggcaggaccctaatctaataggattgatgtccttataagaagagggagagacaccagagatctctcctcccccctcacttgtaaacagaggaaaaatgacggaggacacagcagggaggtgggtacaagccaggaagaggggcctcgccgggaactaaccctgacggcaccttgatccgggactttgggcctctcaaactgagaaatacatgtctgttgtttaagtcactccctccacagtaatctggatggcagcctgagcttaccaaggcaccgtctgcatcagccagggctctccagggagacagccaataggagatggatggatggatggatggctagatagacagacaagcggacagagagagagagagacaggcagacacagacagacaggcagacaaatggctagatagacaagcagacagagagatagagacagacagacacaaacaggcaaacagacaggcagacaaatggatagatagatgatagatagccaggcaggcagatagacacagacaggcagacagacagacagacagatgataggttgggttcagtgactcttacctgtaataaccagcacattggtaggctgaggccggtggatcacttgaggccaggagtttgagaccagcctggctaacagggtgaaaccccatctctactaaaaatagaaaaattagctgggcgtggtggtgcatgtctgtaatcccagccactcgggaggctgaggcacgagaatcacttgaacctgggaggtggaggttgcagtgagctgagatcacgccactgcactccagcctaggcgacaaagtgagactccatctcaaaaagaaaaaaaagatagatagatgaatggatagatagctagatagatgacagatggatgataggtagatagataattgataaatagatataaatgaccgatggacaggcagacatagatacattgattaggtagatgatagatggatagatagaagatagatggtggatgggtgggtagataggcagatagacagttagaaagatagatgatagatagataggaaggaatttattaggggaattggctcataccattgtggaggccaagatgtaccacagaaggccgtccgcaagctggaggcccaggaaagccagtatcgtggctcagtccaagtctgcaggcctcaggactgggaagctgttgatgtaactcttagtttaaggccaaaggtttgagagcctggggaactgctggagaactgggagttctaagtccaagggcaggagaggaaggcatcccacctccaggagaaagagggaattcaccttttctctgcctttttgttgtctggcaatggaatggtgtcatccatattgagggaggatctttaccactcagcccaccaactcacatgcccatctcctccagaaacaccctcacagacacacccagaagcgatgcgttaccagccatcccttaatccagccaaactgacacctgccgtcagccaccacacaggctcagaagaatcgtggttgcatggtgatggtctccatcccgtctaaagaagttgaagatgaactgttggcacaagccatcgttctttcaggctccttccagtcgttcattcttttaaaaatgtattcattgagcacctgctgcatgccaggtgctgtgacaagcactggggcacagcagtgagcaaacaaggactcttgtttcttggagtttacatgcagtagaaggaaacagaatcaatgaattcatcagttctagaaactatcaaaataggactaagagctgtggtgagaattaagataaggtgattgcatagaaagtgactgatggctgctttggaatgagtggtgaggggtcacagagatgatgacagctgagttgagattgggaagacaggaaggagccagcagtgcaaggactaggctggaagcaagcttggtgcattccaggaacagcaaggaggccagaggggctgcagtagagcaggcgaggaggaggagggagacgcaggtcaaagaggagcctggggccagatggaggaccctccctccaaagctcagtcatttcctccttaaaggagaatgtgttacctccaaaagtcacatatgccagcacagtgtctggctcatcatatgccttcagtaggcggtgagcatggctgttcttgttattactacatcacaattactaggaataatggagtcaccaggctttgcatttacagcaatgtgagggagtcagcaagcttccctggggaacccatctcccctcactaagttcataagagcctgataaccaggtcaatgtagtgagagctatagctgcccagtgtactggactctttagccacgggccaggacactttcatctcagcagaaacctctaaggggactggggagtgtgctgtggatgtttctgggttactcagacctcctggggagccttccccaccgcagctgctgcagggagctcagctgcagtgatgaactgcggctcagccttgtttatgggaaaaccctacatgggagatgggacggtttcctgttggttctctcggcctcaggttgctttcacaagtgcagggattctcacctgggtgtgtgaatggggctcaggatgccccaagggtatgtggagatgggggtcagctgtcttctctgatgcctctgaacctcctccccctgcctttctgcatctcattgcttcctggcctctctcactttgggtgctttggaacaacatgcaatccaatacacaggctgactttattattttgttttgttttattttattttattttggaaacaaaggctctgtcattcagcctggagtgcagcggtgcaattgcaactcactgcagccttgaacttctgggctcaagtgattctctcgcctcagcctctcaaagtgctgggattacaggcatgagctgctgtgcctggcctaggctggctttaaaagctcctcactctctctgcatcctgatgatacctacctcctggagcaggctcccagccattggcttcggatactttgtagctattattggccagttgtggcatgtgaagctgaggctcaggagaagggcagtcctgtccaaggccacacggctcagtgctaacactcagacttcagtgtttttatctccctcctggtcgcttccacccttagtgcatctctggaggcccaagggagctaaaggccaggctttggtcagctaagaatttaaaaaagctgtctctgtgctcctctgtcaatccatcactccattatctcccccgacaatgaattcagtttgaatttcagataaacaaggattaatttttagtataagcatatcccacaacagacttgggatatacttatgcctaaaaatgattcattgtttgctggccttagtagctcatgcctacaatcccagtgctttgggaggctacagttggagaattgcttgagtccaggagttcaaggttacagtgagccatgatcatgccactgagctccagcttgggtgaagcagcaagatccttatctcttcaaaaaattgttgattgtttatctgaaatccaggtttaactgagcatcctgtattttatatgagaaccctatataggtgagacccagagtcccaatgcccactggtaagcctttgcagggaggctctgtgggtccttggctggcactgatgccctgtgatgagcagggccatctggcaaggtggacgcctgctgcccatgcaggcagagcaaggccctgggcaggtatgagctgatctcaccttccccagcctgggagccagatactgttggcagcttgccgtcaagagaggggctggtcaccaagagaggggcggcctccatgggccttctttggcttttggctctcccccagccctcctcctaccccaaacagaggccaacggcaccgcaccagaaccagtgtgctgcctcctttggttggcattttgtagttgggtagactgtttccttctcacaggagctggtggtgccccttccgcttcacagggaggatggctgagacccctgaccttgacacagggtgctgttctttttttgttttgagacagagtcttggtcttttcacccaggttggagtgcagtggcatgatgttggctcactgcagcctccacctcctgggttctagcaattcttctgcctcagcctcctgagtagctgagattacaggcgtgcaccaccactgagaacaatgccttctacagtgtttattctcctgtaggagcaagttcctaaggcaaggaggttgctcccctcatggatgaataaattgactttgatccacagccccacgtgtcagccttgagggtggggaaaggttgttctgtgtctaggcagggggtgggggcaaggccaggagggcctggtgcccagtgtacctcttcaggacacaactccaggtagcagaggccaaggacagaggggaggagaagagggaggtggccattatctccttatctcagcttcctttggagataagcttgagtattttagttgtccactaagtctggagataagtctggaatttaaacctttgactttgatccagcccttcacagctcctgtgagcaaactgagcctcagaaaaagggagtgaagcctgtgcatcctggacgcccccaccccaggctcaaaccgcccccaccccaggctcaaaccgcccccatcccagctcaaaccgcccccatcccaggctcaaagcgcccccatcccagctcaaagcgcccccatcccaggctcaaagtgcccccatcccaggctcaaagcgcccccaccccaggctcaaaccgcccccatcccagctcaaaccgcccccatcccagctcaaaccacccccaacacaggctcaaaccaccctcaacccaggctcaaagcacccccaccccaggctcaaagcatccccaccccaggctcaaagtgcccgcaacccaggcttaaagcgcccccaccccagctcaaaccgccctatcccaggctcaaaccgctcccaccccaggctcaaaccacccccatcctaggctcaaaccgcccccaccccaggctcaaagtgggaaggagccacagggaaacaaacgggggaggcacggatgaccaggatgagggtctccatgacccacctttccccaggggctatctcaagagctttttaaacttttattattttttaatagagatggggtcttgctgtgttgcccaggctgatctccaactcctagcctcaagccatcctcccacctcagcctcccaaactgctgaggttacaggtgtgagccactgcacctggcctctctcaggagtttcaagaaaaaaaatgggaatagatttgtgtgtgtgtgtgtgtgtgtgtgtgtgtgtgtgtgtgtgtgtgttttgagaaagagtttcgctctgtcacccaggctggagtgcaatggcacgatctcggctcactgcaacctccgcctctcgggctcaagtgcttcttctgcctcagcttcctgagtagctgggattacaaacatgcaggctgattttgtattttcattagagacggggtttcaccatgttggtcaggctgatctcgaactccggacctcagatgatttgcctgccttggcctctcaaagtgctgggattacaggcctgagccaccgtgcccggccaggaatagattcttttctgtagatgacttctgtcattattgaaaatggatgtttatgcacaattgaattgtcataacgcctcatcctaaaaagctcctttttgagaaaatgtgacttttgatagaggagagactgtccaggcctcattcattgtcagcacaaaggcagagcaggggtgtggcggtgtcaccctcctctgagacagccccatccctgctctgcccaggggttcagaagtctggtctattcgagcccacagaggggtttggagtggctgtcttacatcacaggtggggtctgtaaggatctgaaatgacctttgagaaggcgggtgtggtgggtgcatttcaatcattaaagtaacaacaatgatacatcaaatagtgtctgctcagattctgagtgcctgtttaaacatttccatcttgtgacttgccagattctagcataacaacccaggtaaaagaaaaaatagctgggcgtggtggcttgtgcctgtaatcccagcgtgaggccaaggcaggaggattgcttgagaccaggagtttgagaccagcctgggccacctgagaccccacctctgaaaataaacaaaccaataaaagaccttcatgctctatgtctttcttatatctaggttccccaaattatatgcattggggaaagtccattaagagaagcccctggccgggcgtggtggctcacgtctgtaatcccagcactttgggaggccaaggtgggaggatcacaaggtcaggagttcgagaccagcctggccaacatggtgaaaccccatctctactaaaaatacaaaaattagccgggcgtggtagtgcatgcttgtaatcccagctacgcaggaggttgaggcaggagaatcacttgaacctgggaggtagaggttgcagtgagccaagttggtgccactgcactccagcctgggcgacagaaaaagactccatctctaaataaataaataaagggagagaagcctctgggctcctagatacatgggtcagtgtccacccctgcaaagctgctgtgcccaaagaggggctgtacttggtggaattggggcaaaagagcagggagggcactgggcagttgacctggtctccactactggaaaggggctgtgctgctggtgccctgagctggttccacaaggaagacactgcacagggcgccctaagtttgctctttctgcctaggctcaccctttcctctccaggaccagggagccccgctcgtctcctgtcttcggcatctgctctctggcttgtgagcactgcatttctttctgcttggaacgccggcccatggtgggtccccggactcctgccttctgctgtcttttgccatatctcgtcaaagtgtgttttatttatttattgttattattttttgaaacagagtcttgctctgtcgcccaggctggagtgcaatggtgtgatctcggctcactgcaacctccgtctcctgggttcaagcgattctcctgccttggcctcccgagtagctgggattacaggcgaatgccaccacgcccggctaatttttgtatttttagtagagatggggtttccctatgttggtcaggctggtctcgaactgacctcgggtgactggcccacgtcagcctcccaaattgctgggattacaggcgtgagtcaccatgcctggccaactattataatattgatattataataatatcacagccagataacggtgactaacgcctgtaatccgaacactttgggaggctgaggcaggcagatcacctgaggtcagttcgagaccagcctggccaacgtggtgaaaccctgtctctaccgaatatacaaaaattagccggagcgtgatggcaggtgcctgtaatctcagctacttgggaggcggaggttgcggtgaactgagatcgtgccactgcagtccaacctgggtgacagagcaagactccatctcaaaagtagtaataataataataataataataatatcacttattgagttttaattttgtgccaggcactgtgctagtacttgcgccatgtgacctcattgactcggaacaacctatgagtaagcaccatctctgtccccaaggaagctgagactcaggaaatggaagtcatctcccagggcccacagcaagggcctggcgaggtctgcgttcaaattctgatcatctgactccaggctttcctgcctcctttgcctcccaaaaactcaaatactttcatctgggatgactccagacagctagatttcaattgtcttctctccttctgagtatgttttattttaaaatcacataaagataactcacttctcaactggagccacggaatcgttagatgtcttggagacttttctagctacctctttgctggactcagacacaggcctgaataattaggtccaaggagctgaactggagccgctcgtggccagaggtcccttcctgggaacagcagtggcggcagcggctgcgctgagcctggcaatttgttcaagagcaggggatgctcaggctgcgctcgcccccttcttatgaacggtttgctttgcgtcttctctgtgccaagggctgccaggcaccagatgcccattttaggaaatcagaaaaataaacagtgtaaataaaacaaaaactccacccaagaaatctgagacagatgctgttttccccaccgtttctccacccccatgctgggtttggagagagtgggccagcatgtttcctacggataagaggccctggggtatttaacctggatggaacctcttctattttccttttgcctggtgctagggggcagaaggcaggggtggtgtccatctggcccagggaggaggatagggcagcctttgtcgccggcatcccctgcagagatgtctcagccagaagtgactccatcctcaggaacgtgtgtcctgttctttgctgggcggcccctccttaccccccattgtttccacagtggggtgtgctagatttatgggcagagttctggttcactctcagccccggacagcagaatgtcccagtagtgcactgatggtgtgtgcgtggggatgtgtggaacaggggatagtgaccccgtgtgcgttatatgcagtgcggcttccagtcgggtgtgtgaagggggtgctcatggccatcgtggaagtgagctcagctggggctggagggtccaggctcactgtatgccactcagcagccttgggagtggggttcatcctcctccccgctcctctcccctcctggtcctgggcagcccaccggagctgcactctgggccatctctcctggtcttaaggaggctgtcatttctgggaggcagatgctggcccttccatccttgcttcctggagatctgcgccgaggtctgcctttctgtctggagggactggccaggaacccctgggttttcctggtggggtttttgttgcttagcagtgagcagagtgagtgggcaccaagaggaggatgctgggtgaggtcacggacatggctggggcaggctgggggtgctggaggtgaattccgcagctgtgcgaccttgggcagtttgcccagccctgggcctcgcttcctcctctatgaaatggggcgggagcacctgcctgctggggttgtgggttgggtgaatcggagctaaggtacagctcacagcctgccgtcagaccctcgcaagcagaagtgggtgtccctgctcagcgtcctccggtccctccttcaaggctcagctttgtcctcatctcctccatgaagcctccctggttactccaggagtcacgacccacaccctctttggagccttgtgtcacacgcatttctcacggtgttgctttccctggaggatgggttcaactaaaattggggcccatctgggggttccctccagcaccagagaagctcaggcttagtagagatgggtaccctgtcaatactagttccgcgaaggatacactgtgctcattctgctgccagttgctgagtctggtgtcctgtagttatggaacatgtgtacaggcctgggctgctggacacgaaggccagatgggcagttcactctgcctccgctctgagcctttagaaacaagctggctgcacccatttccatctggtcacagtttaggagtggggttgtggaatggatggaaggaaggatgagtgggtgggtgggggggtgggtgggtgggtggatggatggatggatgatgggtggatgggttgatggatgggtggattaggtggacaggtgaatggattggtgggtgggtgggtgggtgaagggctgaataggtgggttgggtggatgggtggatggatgtgtggaggggtggtggggtggatggggtccatgggtgaatggatggatggatgggtgaatggagtaaatgagtgggtggatggatggatggatgctgcaagagcctttctggagggttccagggaggaactggcatctttgaccagcagccagcatggtgatcagatacagggaggtgtctgggtctgcctgatcccttatctcactgttggtgggactgggctggttatgtgtccctgaagctctctgaagggtggctgtatggcattgcccaggggacatccccagagtgccgtgctctacagcaatagggtggccgcctgtgctcccagggccgctcctcctggcagcctttcgggtttgcttggcttagcacctcagcaaatctcctcgagttaggacttgcctgccatgagcctctccaacaagcagccccaggccaaggcctgtgtgtgggcagagggagcgcatgccgcgggaggctgcattaatctgaggttctgtttttgttccctcctggggcaaaaggtaaaaatagcctgtcccactccatccccaaatccagcccggctgcacccagccctgggagtgaagggggctgggtcaggactgcccgtgagttgtagaccctggtgtagggaaaccctgattcataagacgggtggacatggaggaaggaggagactccgtccagcagagacacgcttgggtgcagcccagcttggagtctgatggacgtgggctcacctgtgtgcaactctcattcactgtgtggccacagggaagtgacactctgtggagactcagattccttatctgcaaaacaggggtagtagggcttgggggaggatgtgtgtgaaggtttggcccagggcccctccagcagccagacagcagtggctgtcatccctccagcgtccagggttacctgggggagtagggcctctgtccccagatgggccccgtttctggctctggaactcacagcaggagcaaaggcgaggacattcctggtgttaatcatccacccggagggagagcgccagtggccttgtgtgacctttgccctttgtctctgtctttaggaggcacgcggacctccagtggccggctccggaggcttggtgactccagtggcccaggtaggtggctcgctccgctctggccccacccagctcatgggtgtgtttgtgctggggtcccttcattctggtctgggacctgcctccccacctggcttccctggatgagtggggccacttgcccatttcccagggagacgcagtctttgacggctttggactcaggtggcttccaggcctgtcgacgctgccctgctggagatgatccttgtgggggcaggggcagccacccccaggctcagggagcaagcccgtgtgtgcgggacagaggagagaacaggagatagatagggctggatgatttggtttgagatgctgaggggacagatgtgccatggacaggtggctttggccgtgagcctctcggtgttggttcagtatctgtgggctccctgcaaccttgcaggatggaagatgctccaggatagagcagatacgtccggtgttatctaggaggaaataagtgggcctctggcagtggtcactgtgctactccttgtgctttttccatgtgtttggaaattttccacactaaccagtagggaagggaaacagatgcacccatcagagctctggggctggccgtccaggacacgagttacagcttataggcttgaagggactctaccaacactgggtgcagcctgggcaagggagtgggacagagaggtcagggctctgcctccagcccttgccccccagggctgagtctgcgcgtcatcttctccccactgggtgtccctgatctcccctgcctgaccccagtgtggccatgctagtgcctctgtttctgggagcctacgttgttcttggctgtcacttccagcggccaggctgggacaggtgcccatctagtggcttttctatttggagaggatgatgggtcacagcaatgaatggacttacctcccctaggagacgaggagctctgagaagagcagagatggcgtggtcacctgtgcatatgtgctgggggccaactgggtgccagacccctggctgccatcatggtggcagacaggcagggactgtgccttcatgaattagccattctagaggagacaaagttaccaaaggacacggacccggagtcaaatccacacaaatagagcgcctgtggaccagggctgccttcagaacaaggtgagacagccgtcctgccaggacaaggcgcctacgggggcaagggcatgtgcccatctggagccgccacctccatgctctagaccagctccgtctaatagaaccttctgtgatggtgggtctgttctatacatctgcactccgccatcctgtatggtagccgcttagccgcctgggtctattgcacactcaaagtataaatgtttacgtttactttattcactcatttacttgcatagaattatttatttattttaaatggatttccacttatatctacgtgtggctagtggctatgaaactgaacagttccagaccacactggcacctgagacctcagaattctagacccaaagcctgcttctgatcctgagcttgcttctgtggggacagcacagacgcctcctaagtctgccttccagaggtggatgcagtgcccgtggactgtgcaccaccaggcctggacagtggagagggtggctttttacagggagtgggagtggaggggatgccgtgtccacattgagtgcatgtgaggccccttgcagtacaggatgggactgtatgtgggaagaggggggtgatgctctggctggaggcccctgggcagctgcatgattcagcgctgtggttaagaggggctccgcccatcgcagtcatgttgggcactaaccactggacagcccagccgctgctgtgtttctggggagcttttctccggctccgcatctgatctgcctctccatctccttccctctcattggccagcttctggtggaatgggtggggagggtcccccagttcttgtgggggttgcatcttgggaacctggcaccctgggctgcatggacacagcctcccccggcggttgcttccctctgctcagactggctggttctgtgctgtcagcacttggcagccacgatcacagctcagcttggaagcctaaggcataatttgctgaatcccaaagctgcaagctggtgatctgggtttgcgtgggactgcctgctgacacacggggtcctccctctgtgggcctctgtgggctctggcccgagacaccctttcctcatcttcttggcttctttctttctccctgcctcccttttgctaagaccctggtccaggcaggagttcattcctagacgccccagcatctccggcctccccatttgacactccccagacgactgtctgccatcccatcctcccagcccagcttctctgtagatccacatctggccaatctcctatgtctgggactcttgccctccccagaaggacgaaggctcttctcgaggttgtgtttgggactgggccagggatgacatttctggcaaaagcttaaatgacaccatgatcaacgctttggtcagctcacacactttctttccttttaaaaaaaaaatggaattcttagagctacaaaacaaaaatgtaaagaataaggtaataaaacacctgtgtactcaccatcccgcttaagaagtgagacattgcaggtgtagccgcagccctgggtgaccttctccatcctagccccactcctgctgcggtgcccgcccctctggattgggatctggccccgggcaggcacatctgtgctgggcagtggtgtgtctgagaagcctaggtctccttttttttttttttgagatagagtctcgctctatcgcccaggctggagtgcagtggcaccatctcggctcactgcaacctctgcctcctgggttcaagcgattcttctgcctcagcctcctcagtagccaggattacaggcacccgccaccatgtctggctaattttttttgtatttttagtagacacagggtttcaccatgttggtcaggctggtctcatacccctgacctcaggtgatccacctgccttggcctcccaaagtgctgggattataggtgtgagccaccgcatccggcctggtctcctcttgcatacggtcatcagcatcgtgtgactgagcagcctaggtctgtctcctcttgaatgccgtcatcagcatcacatccttggtgcctcactggagtcagtggctgccctgcctgtgcccacaacgtgacggcgtggagacttatccgtgtagatccacgaagccttggttcacttattttggcagctagcgagtgttcctctgtgtggggaggcagagtttgcccgtcccgtggcccactggtgacatcgccgaaggtcttctctgttactagtgctgccgggaacgtgtgtttccccaggtggatttggctgggctgtggagatgcgcttctcagcccttctagatgttaccaccacgccctcccgagtggccttctggtaggctctcccatgttcgctcattttctgtgcctcaggcagccgcctctctgactgagcgtccagcggacttttgccctgtttcccacggtgcacggagcatttcatctcagtggtgcctgagcttccctccctctggccctcagaccccggctgggatccttggagccaactcctctgcctgacatcccgtgtcgctaggtcctgctcttccatcttccaatacctctggggtgtgtggccttttccccagtgcccccatcatcccttctgtcctaggttgaaccgtgtcccccacaaactcatgtccaccaaaaacctcagaatgtgacctgggagttggagatggggtctttgcagatgtaagtagttaaggatcttgagatgaggtcattctggattagggtgggccctaaatccaacaactggtgtccttaaaagaagcagagaggccacagacacaccggggagagccacgtgaaggcaggagcagatgatggagtgacgcagccccaggccagggagcgtctgggaagaggcaaggaaggaccccccccccaccccaccccagagcctccctagggagtgtggccttgctgacaccttgattttggacctctggcctccagcatgggagagaacccgcttccattttttcaagccccacagctgtggtccattatggcagccacaggacactgatgcacctcccacctggccgctgtggatggacgaccccgcccgcaggaagtctccctcaagcactgcaggtgtctctgccctcacaggggacgcctgcacaagtaggtgtgaaaaaagggccctgtgggggcaaggcctgggctggtgctcgctgcctcccttcatcctatgctagttcccatgcctcttccggcaggagtgcctggctccacctggtgaatcagagccaaactctcctgacaattggctgtcacttatttaactgccaccatccccaggagacagaaaatgccagaagggtggggcctgtgcagtgcctcctcgctatttccccagggcaccgtgccacgttgcctcaatgcacagagtagctgctcaaagtgtgtcggacgaacaggtgccccatgcccagccatgcagacaaaagtgtgccacgtggagggagctggtcgtggaagagaccaccagcatcttggctgcccgaggaccttgcccctgggctcttgcaggcacccctagttcattacttcctctctcacccatagctacccactcttcctctatttctctgatatcagccttgccacccacccaggtttgcaagcaggaaatctcagagttgaccttgacctctgcctccccagcacccccaggtctcaacaggctgccaagatctcatcaactcgccctctgcatactgacccttggacaggctgccccggtcacggtcatgtcttggttgggcctccatcatccctccttggaccagcaggtgccatcctccccacccctgccctgctgtggctccttcccctccacggccaacatttagaggacgattaccacttccctccctgtgtgctggggaccgggtgataggatccctccacccgatcatttccattagacctgggccgggtcttcttactcatagagcccttagtttccgcccccaaagcctcgagggtggattcgtgctgccgcccagcctggccctgataccgctttccagcctggagccccctgcttctgcgctcctggctctgagtgctcgggccccccctggatgggttgccacttgtcctctggaaagcagggcttccatgctcctggacctcctagctgactcagtgactttgggccatcttgtcacaccccttctatcagcttggccttggttatttctgtgtcctccatagcctcggaccagagccacggcgggatgctttcctggtgcgtggcaggcagtcaggaaatattgctggactgaccttgataggagatgcttgggagaattgcccaaaaaactagcttaaaatgcaaatattggccttcttttgcgttggctaaagagtagcatttctccgtttgcctcccgggtaagaaattgatggcgaatgcaatgtctctagggaggagaagaaggtgacaaaaagggtctgtataacggggcacacgctaggcatttgtgactatttaagtttaaattataacataaatgcgaaactctttgccttggtagcccttccacattgcaagcgttcactgccacatgtggctgccatattgactacggcagatacagaacattgacatcattgcggagagttctatgggggggcgctggtttagatcatcttcacgttggatccacaaattcattgtttatccagtgaacggttactgggcacctactgagcaagcaggatgaaagacacccgctctcgggggagtcttccgttggctgcagagaagcttaaactcaggggacctggggcaaactctgcaagggcccttggcctctgcacccccagacctccctcgctctgcaggggcagtcgggggccccctctaggaatggagcgccagctccagctcctgtcaggctacagcccagatggttggctgagcacgagcatgtgagagtggaattgggcccaaccgggctgcttctccccgttgtcttggtttccttccacgctgacctggaaggactcctaaagcaacaggcctgcccaggcggtttgcaccagtaaaccctgcagcggccccaagggcagagatagctggattgtatttatttaggaacagccaaagtctgaggcacaataaaaagtggagaaagattccagagaggaatgcagctggcctcagcctgggaatccgtcttgcttgggaggctgtaggcgggccaggctggggccagcctggagggtcttggctggctctgctggcaggtacagtagcagggtcagcaggagggagtccaggacggagctccttcatttttaattcagggaagcaaacttcagtggttgagtctgaggatgagcaggaaatgaatggaaaagtcttttttttttcttttttctttctaggcagggtctttctctgtcccccaggctggagtgcagtggcacaattatagctcactgcagcctcaacctgccaggctcaagggatcctcctgccttagcctcctaagtagctgggactacagttgtgcgccaccatgactggctaattcttaaaagaaatgttttcaggctaggcatggtgacccatgcctgtaatcccagtacttttggagccgaggtgggaggatcacttgagctcaggtgctccagaccagcctgggcaacatgacgagaccccgtcttgactaaaaatacaaaaagttagctgggcgtggtggtacagccctgtagttccagctacccgggaagctgaggctgcagtgagttgtgatcacgtcactgtcctccagcctgggcaaagggagtaaggccctgtttcaaaaaaaaaaattttttttttttttgaggtggagtcttgctctgttgcccaggctggagtgcagtggcatgatcttggctcactgcaatctctgcctcccaggttcaagtgattctcctgcctcagcctcccaagtagctgggattacaggcatgagccactgtgcctggactttttttttttttttttttttttgtagagatgggatttctctatgttgcccaggctggtcttgaactcttggcctcaagtgatcctcccactttggcctcccaaagtgttggaattacaggtgtgagccaccacacccagcaggaaaagtcactttttaaagcgagaggttgtgcgtcctctatagcttggcgctcatcagcatggaggatttactggaacgtgtgttaggtgaggggacatggaagatggcagcaaatccgagcccagagcatcagaaagcatgctttcagccaaagatgcgttctctccacctccgcgcagcacccttccccagtgtgtactcctggagcaaggtggggccgatcctacgaagaccctttcccgaaggcccctgctgcccacatcagtgtcacctggaccgcctgctcccttttctggatggctggaccagccccagggcctcctggcctggtgtggggagcacagtccaccctggggaatgcctggtatgtgtcccctccccactgggtaccaggggatgaagctgtgcttcgtggaaggggacagaggcgctggtgcccaggatggtgcacctggggcggctgaactggacctggctcctactgggcccctgtggagcccagattgttgtgagaaggggtggggaaaggcaggtgatccgcacctttcacttttgtttcacatgggaacaggggcttatcctgcacacatattcagtttggagtatgaatttccatgaagaggaaaatctctattaggctctgatgtcaggattgtccgtgagggccgggccgtgttctggggcaaggacaggagtggagggggcaaccagggaaggcttcctaatggaggaggcatttgatagcatcttgaaaaagaagcagttcctaggccaagccagagactgaagaatgaccacctaacttcttttttttttttttgagatggaatctcgcgctgtcgcccaggctggagtgcagtggcgtgatctaggctcactgcaacctccacctcccaggttcaagcaattctcctgcctcagccttctgaatagctgggattacaggcatgcgccaccatgcccagctaatttttgtatttttagtagagacggggtttcaccatgttggtcaggctggtctggaacccctgaccttgtgatccacctgcctcggcctcccaaagtgctgggattacaggcatgagccactgcacccggccacgaccacctaacttctttctacaagatgccccctggctgacgcaaagcaggttgagtgagtgtgacacttccttcctgtctgtgggttccggcctttccagagcccggccagtgctattggagacaaagtggccttcgctcttccttcccgccctgccaggcccagcctgtgccgctgagccccactttgcaattaagaggagctgtgaaccagtgatgctgatgtcgcagaaaagtggccaggggtctatggggggtgaaggacagggatgccgccctgagaactgtctggaaggggcttttgggtaacagtgcccactccagggtgtgggcaggctggggtggctgggagctgggctcataggctggcacaaccagagtttcccaaagccgtgggcctgagggccctgccttcctgggacagcaacctttggtccaatttgggaaaaggtgggttaaaccaagcccggctccctcactgtaggattactcagtgcgtttagtatgcaaatgtgcctctgaatctaagacaggaccacagaaacctcttcagtgttcctctggagggagggaccgcgggggatccaccgcaggggcctgggtctgcactggcctggtgaagtgcccccttagtgcttacaccatgcgcggtgagaggttggccctcgcctcccccaccctctgctggccttacctcaccacctctgcactcgcctcccagccggctcatgactaactcctgcctcttcagagccaatcggtgctgccaggttttccatttcaagtgatcccccgcctgggccaaaatgtttggattttcaggcacggaggggagatggacctcaggccaaaccatgctgggtaaaactgagggtcaaggctgtgctcagcaagtgctccagccctggccgtcaaacccatagtgtgcacagcgtgcaggaggtggctgggtgaatgaactcagtcatagcccggcccctcactcggggctgttcccaagttcccaccgccagccaggctgggtcagagcctcgtggggccttcctgggcttccctgccccacagcaggagttcgtatggagagtctcgagtgaggttaatgggttttcttcctcttctttttttttttttttaatttgagacagggtctcactctttttacccagccagggtgcagtagtgcaattatagctcacagcagcctcgaactcctggcttcaagcaatccttccgccgcagcctcccaaagtgctgagattacaggcacgtgccaccttgcccagctggggtttctgctttttactttttctcttgtttctaaactcaatacaaagaaagatattacatttataatcagaaaaaccaacaaggaatattatttcaaaattggaaaagggattaaagaaacaaaccaagaaacctctgcgattcctgcccatcggagtcagtggttgttagtggttggcttaacacaatgttttaggaagaaatagaataacagaaagcaactccagtgagctgagccctggctccgtctgtggcgctgcatcagtttcctgcagctgctgtaacgagtggccacaagctggctgggtcacaacaacgcccagccatcctctcacagctctgcaggccacacatccgagatcagggtcaccaggctgaaatcagggtgtccactgggcatagccctctggaggctctagggcaggggttcccagccccgtgtgtcctattaggaactggcctgcacagcaggaggtgagtgactggcaagcgagcgaagcttcatctgtatttacagtcactccccattgctcgcattactgcccaagctctgcctcctgtctgatcagccatggcattggattcttataggagagtgaaccgtattgtgaacggcacatgtgagggatctaggttgcgtgcttcttatgagaatctgatgcctgatgatctgtcaccgtctcccatcaccaccagatgggaccgtctggttgcaggaaaataagctcagggctccaactgattctacattatggtgagttgtataattatctcattatatattataataataatagaaataaagtgcacaatcaatacaacgtgcttgtggccgggtgcagtggctcacacctgtaatcccagagtgaaactctgtctcaaaaaataaaaaataaaggccaggcacagtggcttatgcctgtaatcccagcactttgggaggccaaggctggcggatcacgaggtcaggagttcaagatcagcctggccaatatggtgaaaccccgtttctactaaaaatacaaaaattagccggacacggtggcaggcgtctgtagtcccagcttcttgggaggctgaggcagaagaattgcttgaacccaggtggcggaggttgcagtgaactgagatagtgccactgtactccagcctgggtggcagagcgagactctgtctcaataaaataaaataaaataaaataataaatataatacacttgaatcatctcaaaaccatctccccactccctggtctgtggaaaaattgtcttccctgaaaccgatcccaggtgccaaaaaggttgggggccactgccttcatcgcctgcccctttgagcctctggtggctgtgggtgtcccttggcttgtggctgcatggcccttaccttcaacaccagcatctacagatctctccgggccccatctccacttggccatccctgtctgtgtcaaatctccctctgcccccgtcttgtatgagcaccgagactgcctttagggaccacctagaccatccagggtgctctcgccacagcaagatctgcaactgaatcacagatgcaaaaactcttgttccaaacaaggtcccatttgcaggtctagggattaggacatgctatccctggggccattattcagccttctctcgtgactatgatccctcccttcctccccagcctcccacctcggctgagatgctgtccccacctccctcactgtctggctgcctgtggggctgtcctccaggctctttgggaggaggtggttgcttgatgtctcccagaaggctgggaatggtcctccccaccccccaggaagatgtcctttctgccaaggagattgcatttggggtcctatcccaggcagagagcggacgggactgtggcctgaagtggcacttcagggcctttggctctgtcatctagccgagggctgtgcatgggcctcacctggtcacaggtaactcacctggctctgtggggcagggattgtaaactcagaggcctgcggggtgtgtcgaggtagaggggtgcaaatattgtaaatttgttgggggccttggggagcagcacagactgaaaagtgttttgtctgaagagcagaactgtcttataccagccctgtgcggccaggcaggaaggcttccgtggtgcggccacgcgtcctccctttctcaacagaagctgacagtctggagttttcagagagattgcctgagttctcagccttggcacaaacacacattctctttaaacaggcttgggccaacagaaccagcctccgtgtctcgggtttgaatgaacccttgaggtgaagcttaaagacagagaggatgcccctgattcccaccccagggacccacattgtaaacccccacctgctctgctgagcccttggcctcagcatggaccctgaccatgtgctggtggggaccccccaggtaagtaagcagcctctgaggaccccggatgaacagtggggaacagcactgatcccccagtggggccccgagttcccggagaggaagactcgctccctcccaggggacggctagagactcactgactcatgcgtgtgtggtaggaatcttccaggaagtccccgtcccgttcgccctctctgcctgggcggggacggcaactgcctctgtcactgcagactaatgggacggaggggggtgacttctcagggttcctcctgggcaggtgctccggaaccttttctcagcacgctggcctggggcacggccgttcctcctgcccagccacgttggggtacagggtgaagaagggctggggccagcccaggacagaggaaggcgaggcaggcacgcaggaactgggctttttaaacccttaagcccaaggaaatcgtagcatcgcgggacagggaaaatgaaagactttggaagtcgtcaggaatttgactctgtgagttggtttccaagagtctaagttaagcatctccaagtggatattaaaaaggagcagcaagcctcggggcggcgggggctggaggaggtggagagaggaggctgccggaagccgcactcgggacctctgcagccaccgaccagaccgggcggccgggactctgggactctcgcaggcagacccggtggtctgccggactcctcggggcccacttcgggccctctctcctgcctcctatttttggatttctctcctttgctccctttttcctcccgttttgaagagacaatgctacttcagtttggagcacaaacatatgatcagcacatggaaatgtggtaattcggatgcattcgtgattgcaacagattgaagaaattagaccagacaaagagtgtttttagaggaggaggaggaggaggaggaggctgagagagggagggcgacgggggtgagaaaggggaggccgcctctgagcgggacgccgggactcccgccgctgctaaatatatccgtaggaatggagagggaccggatctcaggtacgcagacagccccctccccatcggccgccccccactgccctggactcggggctttatttatgcctgggggaataagcatgcaaagggcgcttttgctcatttttcacagaaatatttcttttctttttgacggttccaagctcgtgggatgaactccgtctcagaagctaagctctcctgagtctggcttttatttaaactcggctctcctctctcctggctacttccctttcattttccagtgtgccattcttgcatgtcatggccactgtcaatgctgaggctgttggcgccgaaaccttgggagggtgtgggggacctgcccccctggctcgggtctggggcggcggcgcttggacctggctggtggttggtttgtccactgtgtggtttgttttttgcttccagccaaagtctgtcttcaaggctgcctcggtctcctacctaaaatagcatttctgtgccttcctggcagttgattatagagggggaagctcccggcgctcagaggagcctggcgtgtgtgtgcacgtgtgtgtgcatgtgtgtgcgtgtgtccattcacgctggcagcccccttgccgcaggcacagacccatcagggcgtgaacaggcaaatgaagagaaagggggctcccctgcctttagttcaccccagctttccaggccctccctcccaggcccagcctccttggtcccttcactcacatgcggtgccgtggctgccatctcacgtggccagcgccgtcatcggtaattagcagtgatgacagtttctgccgctcatgccgccctctgagcccagcgctgggagacatggggtggctgagccaagctccaggctttgggtattctgaagtgacctacgggccatggagcgggaggtcgctaagagtgtcaacccctacgtgccttgggccctggtctgttggttgccactatgtgtgtgttggggggtccctgagaggcctgagagagggaggcccatctcggtggctcctctctaggacgtgtggtcccctccaccactgctcccagggccacatctttttttttttttttctttgagacggagtctggctctgttgcccaggctggagtgcagtggcgcgatctcagctcactgcaagctccgcctccctagttcatgccattctcctgcctcagcctcccaagcagctgggactataggcgcccgccatatttttttgtatttttagtagagatggggtttcaccgtgtcaaccaggatggtctcgatctcctgatctcgtgatccgcccgcctcagcctcccaaagtgctgggattacaggcgtgagccacggcgcccggcctcagggccacatcttgattgtcacgttgggactggtggagcgggtgtgtgttgtgccgctgagcacacccagtcgggcacagcaggcggacctcaggagggggccaggggagacggcagaaggcttgggtggcagtgaaactgcatcttatctgtttgagctcgggggctcaggcccgctgggacgggtgggtgtggagcccagcgtcctgctctccgcccagcaggagccgcagggcagggagcgctgagagggaccttcgtcaggcttgcacagtggagccgtcctcggagtgaccaccccaccaggcagcctgggcagaccacagtgggtcccctgcctcctgggccaccagccccaggaggacgtcactccacccgcctggctggcaggggcctcggggagcctcgggttcggccttcactttatagatgatctagccgaggcccagatgggtgaccagcaggggatctgagagctgagcagagaggcgtgggtttgggggtggtgctccctggggagctggaagtgatggcaccctcccaggctcacaaaacacgggcttttcatgaactgaacaaaacactctttgaaagcagccagtgctgtgccccagagaccactctgatccctgctgcccttggctgaggacagcacagccagggatgaagcggggacctcccctcgggctgtgccttgatgaaagatgctttctacaaaatcccattcggatgtgttttcatgtaagaaaacgtacatttttagaaactcagttgtaaactggctgccttccgaatgaacacgacagtcccggagctgtttcccttaatgaggttctcgtcctgggcaaactttagcgctggtctttaattgtcactgaactcccgcacagtccctggggaagtgacttccttcctgtccctgctgggtggccttgagcaagccacttggcagctctgggccgcagttccgtcatctgcaaggtgaggggtgggagcggcacggcccctaggcagcgcccccacctcctgcgggtttctgcgcgtgtcctgagttttgtgggcgcctcttccctcactgaggggctcttcttctctgcagggcatggctcacgccgcgttgtcaggctgcaagccactgcgagagctgctctgatccccaagcatgctctggcctgaggaggagccatggggaggacgctgtgcctgtgtgacagaggcctgcccggcagatgccggcccgctgacttccagacgtggctgtgggtgcctcatgccccactgggctggcgtgtgaggcgtgtccagctcaggctgccctacagctgcccaggaagggtttgtgggagggggtggtcctaccctggtgagtccacggtggtctgccagccccagggaaggcttaggagccccaagacctgccctcttgtccctccctcggcagtgtctggctccggtctggtttgtgaacgggggcctgggtactctcccgccctccctgggggctgtggccttcccctgggaaggtgctggagggtttgtcagcagggccggcatgagtcatggagtggtgactggccgctgaggcatggaaggccactccttccagccaagggtcggagctttttttttgttctggaacggctttgtggcttttacaaattaagcagttttatcttgttccaagagcttgtatttcagcagggagagagtctccaagaagggaactttccactggggagctctgttgggctgggaggctaggaacaggccacgagggagggctgcaggcaggggaagtggccgtctgtgcatggtcatgaatgcaggcccggggtcctggagggggcttggccacgctgtcgctggacgtctgtccccaccagggtccatctgatgcagtacggcacagggtaaagcccagctcctcttacggggttcctgggtcatcagtgggcggggaaccgaggcctcctggagggcggtgcctcagccctcacccctccctcctgtccctcgctgtgctgtccccgatggcctctgccatcccctgggagttcttacccctggacgctcggtgcctgtccggtctcaacctctccagctctgcttttccatctccgaggtgagaggcctggcctgacgcgctctgcacccgcttcctgcccagccccgtgggaactctggtccctgtagtggtttcctggggctgccatcaccaagtgccacaaactgggtggctcaaaacaccagacatttcttctctcgccgttctggaggccagaagtccgaaatcacggcatcagcaggcctggttctttccggaggctccgagggggagcctgcttctcgcctctggcagcttctggcggctcccgaaacccttggcgttccttggctcgtggccacaccactcgacctctgcctccgttgtcacggggcctccttctgtgccctaaatctccccctgtctgtctctcatacggacagtctttctcggatttagggcccactgggtaacccaaaatggtcccatctcaagatccttaacttcataacgtctgcaaagaccctttttccaaataggccatgttcataggctctggggtggatgtaaattttaggggccacctttcatccccctgttgtccccgtgtgtctggatgcacagcatggttccatgtcccagactccttgctggacccctctggccctttggggtggcctttggccttttccactcgtttctgtgctcctggtgaggtgtcggggtcgggcttagcccctgcaggaattctggggacagcatggagccggcaactccccaccaggcgtcttcctacctgcccagagctcatggttgtgaggggtctctccttgtggttttgatttgcaattccccagtggttagtgatgttgagcatcttttcgtgtttattgctcatttgcacatattcttgcagaaatgtctgtccaagtcctttacctgtgtttgatttggatgattgttgttgctgagtgttaggagatctgtagattaatatccagatactaatcccatatctgacctatgatttgctgccattccatggattgccttctccccacgttgttagtgccctttgatatgcaatttttttttttttttttgagatggagtctgactctgttgcccaggctggagtgcagtggcatgatcttggctcactgcaacctccgcctccctggttccagcgattttcctgcctcagcctcctgagtagttgggattacaggcacccgccaccacacccagctaatttttgtatttttagtagagacggggtttcactgtgttgactaagttggtctcgaactcctgacctcaagtaatccacccgtctcggcctcccaaagtgccggagttacaggcgtgagtcaccgcacccaggctgatatgcaaatattttaaacttctatgacgttccactttatctatttgttcttctgttgcctgtgcttttggcgccatatccaagaaatcattgccaaatgcaacgtcaggaagcttttcccctgtgttttcttctaagagttttgtggttttagctcttgagtttaggtctttgatgcaagttgagttgatttttgcatgtggtgtaagggctggtccagcctcatgctctgggctcttgattcacttctcttcttttctcacgcccagctggttccgctgggtggcggggaggagtggggaagtcccgggctgggcctgcactcgatcatcccctctcaggccagccagggagtctcagctcctgcccaggacctggctggacgtgctccctaccgggaaagcctgggccgtctttctaggctgatggcagggccagcccggggcgtcctgaggcctgccctgcggacatgccccttgttctaggtggtgtggctgcccggcctgcgtgtgagaccagctgtctgtgcttcaggccatggaggctgagtgtttccagcctgtccccttgctcggctctccctctggggaagcccctgcagcccattctctgcctccgcttctgccatctgtgcctttgtctgcttcctgtttggaggtggtcatccctggggccacccctcatgatctggacacaagtctccatcctgaagccaccacccaaacccctgtgcctcaaacccctcccacccaccacatgggtttccactgtgaccaactcagcagctgatgaagcttcccttggggctctcctagcaacggggagctggctttcccggaggcctggcctctccctaagtggaagtggggcgtgagggtgtcagcctttttctgctgcctggtgctctaggttggcttgtcacccctggaagcacttgccatccttatacagcaccccacacccacctccccgcctcctaccccttcttccaaggggtcatctctgcttccctccccacccaacctcacccatgtggtccgcccagcaacctttgacccccaacatgacaaaataaacctcccttgccggtcactcattcattcattcagcattgggtgctccctgtggacttggcgctggggtcccgtggaggacaaagccagacacagtccttgccctcatgggactgcacaagtgcaagaccacatcagtaaacgtgaaacacaggaagtgacaggtgtgacaaaggggaccagtggcaggacagaacctgcggttcgtaggaccaggtcaggagggctgcctcggggggacaccttcgggctgagcgcagaaggatgaggggagtaaaccaggctcaaacccagcaggcagaggcgatcgctgcaggcaaccggcaatgtgttcaaaggccctggggcgcggggggctgaggccggcagcacggcaggaagtaagactggggttgaaagagactgactgtcatgttgtgaaatatacacttggttttcatctccatttcctggcacacaactcctaaaatccttggaatctccaaagtgatgtctttttggatgctcatgattgacagaccagctggcagcttcaggatggttcccagggaagaccaggtagaatcacaaggttcagcaccaccccgcaacctccaggtaggggagaggggctgaaggttaagcagatcatcagcggccaatgattgaatcaatcatgccttcgtaatgaggcctccgtgaacactcagaaggatggggttccgggagcttctggatggatgagcatgtggaggctcctggagggtggagcgcctggggagcacatggaagctctgcgtccctcccccataccttgccctacacatctcttcccctgtatcctttgtaatatcctttataataaactagtaaattccatgagccccaggaacatgtgtaaaagaaaaaaaaaagaataaaccatagctgctgtagcaagttaatcctaccagcactggctctcatctgccgaccttacctctggcaatgcctccctctcctgggctcctgggacccctccggccccaccacccctcctgtagtggtctcgctggctgctgccctcaggttagtttatttttacccggcctgctcccaccaggggctgaggcctccttgctcactccagcttcctggcccgtctcttgctctgggcacccccccactccgaacggccagagcttctgaagccgctcgctgtgtgcccccgcctggccccatgcatcccgcacggtgctccccagggtctcccactggcaagggcattggcatagattctggggctgccttggttcaagcccaccctgacttggagcctgagggtccctgagggggtcctgaaggccagggcaggcaaggctggcatgctctgggcagtgggggctgggtatgggaggggatcgtgggtggggagattcctcttaaccagcggcccacgtttggagactgatttgggctccaggctacgccttgaaattgggacagagagtggcgcagatctcagcccggagactccctctgcctgtggacgccctcatacctccatccgtggagccaccctcctctttttttttctaaatggggaaactctgacttgaacactgaataaacaacacaccctcgaaatcagcgaagaggcactggctctgaaactttgccatgaaagcttgaaaatgctctttggaccgatttgctggaacagacgggtgtgatggggctgcggggtttcaggtggcaggaggcgtccccgtgcctagggcatcccgatgctcagagtttccccgtgcccagtgtgtccctgtatccagggcatccccatgcccagggtgtccccgtgcctagtgtgtccctgtatccagggcatccccatgcccagggtttccccgtgcccagggtgtccctgtatccagagcatccccatgcccagggtgtccccgtacccagggtgtccccgttcccagggcgtcctgtgcccagggtgtccccgtgcccagtgtgtccctgtatccagggcgtccccatgcccagggtgtccccatgcccaggcactgcctctccccactttcctaatctccctccaccaacaggtgtcagctgtgaaatgcctgctgtgtgtgtcctttggttgagttcatcttgtgctcttaagttcctgttagacacaggcaggctgctttagttcttctggcaaatgttttgttgttgttgtttgatacggggtctcactccgtcacccaggctggagtgcagtggcgccatctcgcctcactgcaacctccgcctcccaggttcaagcgattctcctgcctcagcctcccaaatagctgggatgacaggcgtccgccaccatgcctggttaatttttgtatttttagtagagatggggtttcaccatgttggtcaggctggtcccgatctcctgacctcaagtgatccacccagcttggcctcccaaagtgctgggattacaggcatgagccaccgtgcctggcccgtctggtgaatgtttattgaggcctactatgtgcagcccctctcttaggtgcttggcctgtaatgaggagcaacaaagacacagtcgctggtcgcttgttacttaacagttggaactgagaggcagtccacaaatgagcaaatccataggtggttttagatgaggactgtgaagaagctaagaacaggttgctgggggtgcatatctgtgtgtgtggcgaggggattaatggaagccctttctgagtggtgacactgagctgaagctgtaatgaccagaaggacccagccaggccaaaatccaagggaagagcaacctggcaaaggaaacagcaggtgtgaaggcccgaggctggagcctggggaaggtgggagtggctggagtgtgttttcagagacgggccatggtgacaccaatgcgacaggcagggccaggtcgtgccgggccttggaggccctggtgagggcttgattttattctcactatggtgggacctcagtgccctgtggctgctgagaatggccaggggcaggcagggaggcctgctagggaggaggctgctgcaggccctgcagctggagagggaggatcaggatctctttagagaggaagttggagagggaggatctctttgattgctggatggacccacctgcctggctgcccccgtcagcatccagcagaggccactggatgctgacaggtggccggccctgcccagccttgcactgccctgtgctgccctggtggctgccggctttaggaggagcgcttttggtgtctgagcccagtggtcctggctgtggtttggtacacttggccgtgggtgaggccaaggtggtttggatcctgggaaggttgggtacctggcagcctcaaggcaggagctggggtgttggaggaggaagcacgctcatccctcgttccttcctgtttcgtgggatgctgagtctctgggcagggacatggtgagccctggtgtgatgcacttaacacctgctggtgcccccatccccaagcaggaaccctggtgcctggtgcctgaggactgctgtccaccgtcccaccatccttcaggtttcttcccagcctctgactcggggcaaggttcagatatccagaacattcttggctggctcttggagctggggtgaggcagaacctccctcccatatttacagcaccagccaaggcttcggggtttggacaccatccctgggaggggtgagcaggacaagtgaggtctccagacttggggtggcttcggactggccaggcaggtgggtgggggctgcagtccatgcccccgctccaggcaacacagtcgagctgcagcccccgctccatccccagctggggctccctgtgctcaccttctgcttccttcctctccctcggaatggggggtggacactccaagactagcctcccagccactctccctgcctcctgcctcctctccttcgggacagacccctgtgatcgctgggtgttcctgatgctctgtcccctctgcgtcctgtgccgtgggtgagagagggcttcggggggacttccccctcttggagcacctgctgctccgggtgcctctgggggcgggcccccacctcacattgtggagctggtgtaggaaggaaggtgccgggagccagctccaattcacgtgctggctgtggccctcaaggtgtggatggcaggaggtggtgagacagggactcattgatcatgggactgacaccccctcatgttgatgtgggccctgagccataatctcaccagctcctgagttttggcgctgctcttggcgatggcgtggactcagccaggctctcgggcagcctttcctggattcttcctccgttctcccctgggcagtgtttctgttcacctggaaaggatgggtaggacttggagacaacagggattcaaagaagtcgggagtgggggcacctgtgcagctcaccctgcagaacagacaatttggttaaagcctaaagcctgctgtcaggagcctcgcttgcctctcagagagcacatggcttgaccatcacggggactgggggagaggcacaggcatgcctgtccggcagcagaagggaaccccgggcctgggcctctccattctgtggcgttgtctttcctcagagttgcactgtctccttcactgtccctgcctggccccagtgctcatgtggcttgtggccctcagtctgggcttggtctcccgcaattcaccctgcccagccccacacagcttgtccctccagctgggaatcggagctcacctggagtcccaggcagcagattcgatgcagtgatgcagggctgtcagccatgccagcaggccctgctgctcacagagggatgggtattgctgttgacaataattaaagaactacggcttcaggctgggtacagtggctcacacctgcaatcccagaactttgggaggccgaggcaggagaatcaattgaatccaggagttccagaccaggctgggcaacatagcaaggctttgtctttacaaaaaataaaaaataataataataataaaaactacagcttcagaatgattgacttcagcatgtttataaagtcaagggtcttcagtgtcctgggcctatgtcactgcgtcagagggagagaggaagaggctggggtgatgggcactggggcttatgctcctcctggaatgggtggtcttggactgtgcctgtgtgatatgtttgtcgagcgggggcggtgtccactgaggactggatgttgaggtgtgggtggggggaggttatgaagcactgggcatttcccgtgcaccagtgccccgagattgcagagaggggacccgcccagcctgggcagggaggcgggtggcagcgaggaaggggagaggaactcgggtgcagaaagcctttcctccagcaggtggcgccgcaagctctcgagagtccagctcctgcggggtttgcattttcactgaatttgtgggcagaggctgcctgggtgtagtttccgccaactgtgactgctcactgcgggcgaggggaagtggagtgcagagaatgcaccggagggcagatgaccagcccccgcacaggcacgggggtgcctccttccccgcacaggcacggggggcccgagcccttggggttcctgtcctaactgggcggggaaagggagggttggaagctgagttagggggaaagggggtggtctcctgccatctcttttattttatttttcctatttttggttgataggtttcaatcttttttacatttttccaactttttgccgtaaaacttttcaaacatagaaaagatgaaagagggctgagtgtggtggctcatgactgtaatcccagcactttgggaggttgaggtaggaggatcacttgagcccaggagttcaagaccagcccgggcaatatagtgagatcccatctctataaaggatacaaaaaattagtcaggcatggtggtgcaggcttggagtcccagctactcggaaggttgaggtgagaggattgcttgaacctgggaggttgaggctgcagtgagctgggattgtgccaatgcactccagcctgggcgacagaacaaaaccctgtctcaaaaacaaaacaaaacaaaaccacaaaaaagaaaccatgaaagattctaaagtaaacacccatgcacctaccacctagattccacagcaaccattttgctgtttgcttcaccacaaatccctctggccaccagcatccacgctggttttgatgcacttaaaataagctgcagaaatcagcacacaacatcctgtcaacacctcagtttgcatttcattaactagagtccggcatttgtctgtgattatttttgtttttctttgaagtaaaatgtatataccctgagatgcacaggtgtgaaacgttccgttctttgaattttaacaaaggtatccacgtgtatcccagcctgaccagaacatagaacatcactatcaccccagtaagttcctcatgcccctccaggtgcatcacagtccccaccttccccagggcaaccacaattgtgctttttttccaccacgaaataattttgccagtttgagtgtttcttagagctacccatgttgctgcaggtgccagcgatttgttctgttttattgctgagtaacgtccactgtgtgaacattctgtgggtttttagtcattctcttgttgaaagacccctggctgtttccatctggaggctcttatgagtaaacctgttacgctggttcttcttgtacaagtttttctgtgcatatgggcgttcatttattctgtagaaacacctagagtaggtatagggtaggtatacatttagttttataagaaactgccagatcttttcccaaagtggcccttccatttcacactcccaccagcaatggatacgagttctagttgctccacatcctggccaacatttggtgctgtcactctgtgaaatcttagtcattctggtgggcgtgtagtggtatcatctcattatggctttaatttgctttggcctgatgactaatgcggttgagcacattttcatgattggctcttcatatatttttcctttgtgaaatgtcttttcaaatctgttgctcattttaaaattgggttgcttgactttttcttctggatactgatcttttgtcagatacgtgttttacaaatattttattccagtctgtggcttgcctgttcattttctttcctttttcaagaacaaggtctcgctgtattgcccaagcaggtctgaaactcctgggctcaagctgtcctcctgcctctgcctccccaagagccggttttacaggcatgagccaccatgcccggcctgttcattttcttagtggtattttccaataagcaaaagtgtgtcactttaatttttatgaagtctaatttaacaaactcctttctttgtggttctctctctgtgttctttgtaagaaacctttgcctaccctgccaaattgcaaagatatttatgttttcctttagaaggcttagagttatatagcttttatgaattaacttttgcatatggtgtgaggtagagggtcagggttcattttgttgtcgttttatgtgtttattcagttgttccaaacttcatttttttttaaagcttttattttgtattttcttggtgacttatgaggtcgcacaattttccaagatccttgttggtcatttacgtattttcctttgtaaaattatctgtccacgtcttacttctttttaaaattatgttgtttcaagatcgagtgatttctgaagccttcattttataatgcttgaaagaatgaacaccttgttccccagctacaggcttctgctctttgtcctgcagctgcacagtggggtaagacttgggttttgttttgttgctgctttgttgtttcttcatttgactgtttccccatgggtctcatttaaaaaaaaaattggccgggcacagtggctcacgcctgtaatcccagcactttgggaggccgaggcgggcagatcacgaggtcaggagatcaagaccatcctggctaacacggtgaaaccccatctctactaaaaatacaaaaaattagccgggcgtggtggcgggcgcctgtagtcccagataatcgggaggccgaggcaggaaaatggtgtgaacctgggaggcggagcttgcagtgagccgagattgcaccactgcactccagcctaggtgacagagcaagactctgtctcaaaaaaaaaaaaaaaaaaaaatgttgtttcatatgttttttatatattctggatataagtcctttatcagatatatgtatcataagtttttttttccacattgctcctttccttttggttttcttaatgatgttatttaatgagcaagagtattttgttttcataaagtccaatttatcaactttttccagtttcgatttatgatttttgtgacctatggaggaaatctttgcctacactaaggtcaaaagaagttctcttattttctagaaattttatagttgtatattctatgattccttttattttttaattttttaaatttttacattttttaacctattatagccgtcaggatgttgtatgatccattttaaatcagtttttgtatttggtttgaggtcagggttaattcttgtttttctatactcatatccagttctagcaccgtttgttgaaaagacataccttactctattgaattacctgacacctttgctaaaaatcattgactgtatatgtggccctatattagtatatgtacgtatatacatgtaggccctgtgttgactgtatgtgtggtcctatattagtatatgtacgtatatacatattggccctatgttgactgtatatgtggtcctgtattagtatatacatatcagccctatattgactgtatatgtggtcctgtattagtatatgtacatatatacatgtaggccctatgttgactgtatatgtggtcctatattagtatatgtacatttatacatgtaggccctgtgttgactgtatatgtggtcctgtattagtatatgtacatatatacatataggccccgtgttgactgtatatgtggtcctgtattagtatatgtacatatatacatgtaggccccatgttgactgtatatgtggtcctgtattagtatatgtacatatatacatataggccccgtgttgactgtatatgtggtcctgtattagtatatgtacatatatacatgtaggccccatgttgactgtatatgtggtcttgtattagtatatgtacatatatacatgtaggccctatgttgactgtatatgtagtcctatattagtatatgtacatatatacatgtaggccctatgttgactgtatatgtagtcctatattagtatatgtacatatatacatgtaggccccatgttgactgtatatgtggtcctgtattagtatatgtacatatatacatgtaggccctatgttgactgtatatgtggtcctgtattagtatatgtacatatatacatgtaggccctatgttgactgtatatgtggtcctgtattagtatatgtacatatatacatgtaggccctatgttgactgtatatgtggtcctgtattagtatatgtacatatatacatgtaggccctatgttgactgtatatatatatgtggtcctgtattagtatatgtacatatatacatgtaggccccgtgttgactgtatatgtggtcctgtattagtatatgtacatatatacatgtaggtcctatgttgactgtatatgtggtcctatattagtatatgtactgtatacatgtaggtcctatgttgactgtatatgtggtcctatattagtatatgtactgtatacatgtaggccctgtgttgagacactattgtgttttcttgatattttgtccattcctttgctgatgccacatcttgattaatgtggctttacagtaagtcttaatataaagtctctcaaatatctaaaatattactttgaatattctaggtcctttgagtttccttataaatttaagaagtagcttgttgatgtctacaaaaatgcagtgtgaattttggttgagattgtgttgaatctgtagatcaattaaggaagaattggcattttaacaatattgagtcttttgtatagatggtatatctccgttttaaaggtccttttgtatttcttttatttctctactgaaaaaaaatctctacagaattacattgttttgtagttttcaagaaaaagatcttgcatgccatttgttaaatttattcctaagaattttacttttggcactattttaagctgaaatagattttaaatttcatttttaattatttgctgctagtatgtaaaaatacaatagatttttgtatgtaaatcttatatcctatgatcttttccaaagtcatttattactctggtaatggttttgtaggtcttttaggatttaaatacatagttttacttctttctgatcttgatgccttgtttttttttcttgctttattgcactggttagagctgccagttcagtattgaatagtagtgattagtggacatccttgcctgtgccaaacttataatgttaactttagatttgtcatatatgacctttgtcagattgaggaaattcccttctattcttaatttgctgaaattttttaacatgaatgggtatgattttagtaaatgctttttctgcatctatggaaatgatcattgttttgtcttttattcgtttaataggataaattacaatgattgatttttgccccccgttttttttttttttttttttaaagaaacagagtctcactcttgcccaggctgtagcacagtggtgccatcgtagctcactgcagcctgaactcctggacttaagcaatcctcccacctcagcctcctaagtagcagggactataggcacatgccaccatgccaagctaatttttaatttttaaaattttttgtacagatggggtctcattgtgttgctcaggctggtctgcaattcttgagcttaagcaatactcccacctctgcctcccaaagtgctgagattacaggtgtgagccactgtgcaggcctgattttttaatattgaaccaaccttgcatttctggaagaagtccaacttgcttatgagatatcatcctttttatatattgctaaatttgatttgcccagtttttaaggatttttgcgtgttgattcatgagggatattggtgtggtattttctttgtttgttagtttgtttcggtaatgtctttgtcagcctcattttggcttcataaaattagtttggaagtgttcccttctctttgttttctgtgttttcataaggttgatgttgtttcttccttaaatgtttgatagaatccaccaagaaaaccgtctggacctagaattttctactaggaaaggtgattgtttgtttttaatcacaaattcaatttaatgtatagaaagagttattcaggtttttttacttccccttgtcttacttttggtaagttgtactttgaaggaatttgtccctttcaggtaagttgttgaatttactcatttaaagttgttcgtaatacaagcatacctagggtttgcttccagacctcggcaataaagcaaatattgcaataaagcacgtcacacaaactttttggtttcccagtacatataaaagttatgtttaggccaggcatggtggctcatgcctgtaatcctagccctttgggaggccaaggtgggcggatcatttgaggttaggagtttgagaacagcctggccaacatggtgaaacctcatctctattagaaatacaaaaattagctgggtgtggtggcacatgcctgtagtcccagctgcttgggaggctgaggtgggagaattgctcgaacctgggaggtggaggttgcggtgagctgagatcacaccactgtactccagactgggtgacagggcgagactccatctcaaaaaaaaaagaaaaaagttatgtttacactatactatagtctattaaagtgtataagatcattatgtctttttgctaaaaaatgctaataatcatctgagccttcagcaagccataatctttttcttggtagaaggtctgcctcaatgttgatggctgctgaccaggtggtggttgctgaaagttgaaggtagctgtggcagcagtttctttgtttcttttttctttttctttttttttgagacagagtcttgctctattgcccaggctggagtgcagtggcacgatttcagctcactgcaacctctgcctcccgggttcaagcaattctcctgcctcagcctcccgagtagctgggactacaggtgcctgccaccacgcctggctaatttttgtatttttagtagagacagggtttcaccttgttggccaggctggtctcaaactcctgacctcaggtgatccacctgccttggcctcccaaagtgctgggattacaggcgtgagccactgcacctggccggcagtttcttaactgaagtttttgacatgggttgactctttctttcatgaaagatttttctgtggcacgcattatgtttgatagcatcttacccacaatagagcttccttcaaaattagagtcaattctttcaaccctggccacggattgatcaaataagttgatgtaatattctaaatcttttgttgtcatttcaacaatgttcacagcatcttcgcctggagtagatcccatctccaggaaccactttgtctgctcatccataagaagcaactcctcatctgttcaagtttgatcatgggattgcagcaatccagtcccatctccaggctccacttctaattctagttctctgctatttccaccacatctgcagtgacttcctctgctgaagtcttaaaccgctcatccatgagggttggaatcaacttcttccaaactcctgttaatgttgatatttcaacctcttcttgtgaatcacaagtgttcttaatggcatctagaatggggaatcctttccagaaggttttcaatttactttgcccagatccattagaggaatcactaactatggcagatactgctttataaaatatatttcttaaataataagacttgaaaatcaaatttatcccttctccatgggctgcagaatgggtgttacattagcaggcatgaaaacaacattcatctttacatacatctccgtcagagctcttgggtcacaaggtgcattgtcaatgagcaataatattttgaaaggattcttttttcctgagcagtaggtctcaatgatttttttttttttttgatggagtctcgctgtgtcacccagaatggaatgcggtggcatgatctcggctcattgtaacctctgcctcccgggttcaagtgattcttgtgcctcagcctcctgagtagttgggattacaggcacacaccaccatgcttggctagtttttgtattttttgtagaaacagggtttcaccatgttggccaggctggtctcgaactcctgacctcaggtgatccacctgcctcagcctctcaaagcattgggactacaggcatgagccactgcaccgggccctatttgttttttttttgttgttgttttttaattgagacagagtctcgctttgttgcctagactggagtgcagcagcgctatctcagctcaccgcagcctccgcctcccaggttcaagtgattctcctgcctcagcctcctgagtagctgggactgcaggtgtgcactaccatgcctggctaatttttgtatttttaatagagatgaggtttcaccaccatgttggccaggctggtcttgaactcctgaactcaggtgatttgcctgccttggcctcccaaaatgctgggattacagctgtgagccaccgtgcttggcccttttttgtttttttgttttttttcaaattgagacagagtctccctctgttgcccaggctggagtacagtggcacgatctcggctcactgcaacctccgcctcctgggctcaagcggttctcctgcctcagcctcccaagtagctggaattacaggcgtgtgacaccatgcctgaataatttttgtatttttagtagagatgcggtttcaccatgttggccaggctggtctcgaactcctgacctcaagtgatccccccgccccagccttcaaaagtgctgggattacaggcgtgagttgccgcaccaggcctcaatgggtttttaatattcagtaaaccatgctgtaaacagatgtgctgtcaagtagggcctgttattccatttctgaagcatagacagaatagatttggcagaattcttaagggccctaggatttttggaacggtcaatgagtattggctttaacttacggtcaacagctgcgttagcctctcatgagagtcagcctgtcctttgaagctttaaagacaggcattgacttctcccctctagctatgaaaatcctagatgacatcttcttccagtagaaggtgggacatctatgctgaaattctgttgcttagtgtagccaccttcatcagtgctctgagctagatcttctgggtaacttgctgccgcttctccatcagcacctgctgcttcaccttgcacttttacattatagagatggcttctttccttaaacttcatgacctgacctctgctagcctcaaactttccttctccagcttcctcacttctcttagccttcataccattgaagagagttagggctttgccctggattaggcttttgtttaagggaatgttgtggctgatttgatcttctatccagaccactcaaactttcttcatatcagcattaaggctgttttgctttcttcttcttcatgtgtgcactggaatcgcacttttaatttctttcaataactttttcttggcattcacaacttggctagctatttggcataagagatctcacttttgcctgtcttggctttcgacacgccttcctcactcagcttaatcatttctagcttttgatttaaagtgagagacgggtgactcttcctttcacttgaacacttagaggccattgtagggttattaattggcctaatttcaatattgttgagtctcagggaatagggatgcctgagcagagggagagagagcggggaacagccagtcagtggagcagtcagaacatacaacgtttattgaataagttcactgtcttatctggatgtggctcgtcatgccccaaaaacaactgcaataatggcattgaagatcactgatcactgggcgcggtggcccatgcctgtaatcccagcactttgggaggccgaggcaggtggatcacctgaggtcaggagtttgagaccagcctggccaacatggtgaaacctcgtctctactaaaaataccaaaattagccaggcgtggtggcgggtgcctgtagtcccagctactggggaagctggggcagaagagtcgcttgaacctgggaggtggaggttgcagtgagccgagatcacaccactgcactccactgcactccagcctgggcaacagagcgagactccatctcaaaaaaaaaaaaaaagggccgggcgcagtggctcacgcctgtaatcccagcactttgggaggccgaggcgggcagatcatgaggtcaggggattgagaccatcctggctaacacgatgaaaccccgtctctactaaagatacgaaaaaaatagccgggcgtggtggtgggtgcctgtagtcccagctactcgggaggctgaggcaggagaatggcgtgaacccgggaggcggagcttgcagtgagccgagatcgcgccgctgcactccagacagagcaagactctgtctcaaaaaaaaaaaaacaaagaaagaaaaaagaaaaaagagatcacagatcaccatagcagatataataataatgaaaaagtttgaactatttcaagaatcatcaaactcctacacagagacacagtgttaacatgttgttggaaaaatggtgccagcagacttacttgatgcagggctgccacgaaccttcaatttgtaaaaagtgcagtatctgtgaagcacaatgaaatgaggtgtgcctgtgttccttgtcactgtaatgtcggtaggatccgtaaggaaaacacttcattccttttattgtgactttatgttcgccatctccctctcatcagcagcctggctaggaggttatcaatctagatctttttaaagaaccagcattggactccccttttctggtgtccatttccttgagtttctctgttatcttcattacttccttccttgtacttgcttcagcgcattagtcagggcccagtcaggaaacaaaaaccacaccggcaatttgaatagcaacttgtaatataaagtgttcttaactgtaagaggtagttaactattaaagggatcacaaaggggtgacattgtgatataagaaagatgtatttgggctgggctcggtgcagtggctcatgtttgtaatcccagcactttgggaggctgaggcaggcggatcccttgagctcaggagtttgagaccagcctgggcaacatggtgaaacctcatgtctaccaaaaatacaaaaaattatcctggcgtggcggtgtgtgcctgcggttccagctacttgggaggttgaggtgagaggatagtttgagcccgggaaggcagacgttgtggtgagccgagattgcactactgcactccagcctggatgacagagggagactctgtctcaaaaatcaatgtatctgtctgtctgtctgtctatctatctatctatctatctatctatctatctatctagtctctgtcccccaactttgtttggcatgtagctcctaaaactcttgaaatctccaaagtgatgggtgtctttttgtttgctaaggaggcgactggtggctggaggctcctggacagcctggggataagggctggttgccaggggacccagccttgtgattagaaggctagaacttgcagcctttcccatccacctcctgcgaggcaagaggggatgaaggttgagttgatcatcaatggccaaagatttcatgtcatgcttatgtagtgaagcctccctgaaaacccaaaaggatgaggtttgtagagtttcaggttgttgaatacctgcaggtgctgggagggcagtgtaccctcccgtggaagctccatgccgcttccttcatacctttcttatgcatctcttccagttggctgttcatttgtatcctttgaaatatcatttgtaataagtcagcaattttaagtaaactgatttcctgggttctgtgagtcactcaagcaaattattgaacctgagaagggagttgtgaagacctcaaatttgtagccaagtcagacagaagttatgggtaacctggtgtcttaccacttgcgactgatctctgaagttgagggcagtcttgtgagatggaacccttaacctatgggatctgcactaactctggttggtgtcagaattgaactgaattgcaggacacccagttggggactgctgagtattggagaattgcttgggggtcggcgggaggaaaccacacatctggtgtcagagctgaagcactgagtgttgtgaatgagagtggagagatagagtttgttttgccttatgcaagaggactctaaggagtatagaaagagcaaatatgagaagcagctactttagaagaaaacataggaggaaagcttcgtgacattggagttggcaatgctttcttggatgtgacaccgaaaatacaacaaaagaaataaatgataaattggacttcaccaaaacttaaaacttttgtgcatcaaggaatactaccaatggcgtgaaaaggaaatccacagaatggaagaaagtatttgaaaatcgtatatccgataaaggactagtatccagaatatataaagaactcctacaactaagccacaaaacaaaaaaaaacaacccagtgaacagacatttttccacagaagacataccaatggccaagaagcacaggaagagatgcgcagtgtcactaatcatcagggaaatgaaaatcaaagccacaataaaatatgatttcacaccctttaaggtggctgttagccaaaacatggataacagcaagtgttggcaaggatatggagaaattggagccccgtgcactgctggtgggaatgtaaaatggtgcagctgctgtggaaaagatataacaattgctcaaaaaattaaactcagaatgaccataacatccagtgattccacttctagatgtatactccaaagaactgacagcagggacttgaacaggtgtgctacattcttgtttgtagcagcacttttcccataaccaaaagatgcaggcaacccaggtgtccaccagcggatgaatgaacagacaaaatgtggtccatctgtacagtggaatattattctgccttaaaaaggaaggagaggccaggtgtggtggctcacgcctgtaatcccagcgctttggaaggccgaggtgggcagatcacttgaggtcaggagtttgagactagcctggccagcatggcgaaaccctgtctctgctaaaaatacaaaaattagccaggcatgggggcatgtgcctgtaatcccagctactagggaggctgaggcaggagaatcgcttgaactagggaggtggaggttgcagtgagccgagaccatgccactgcactccagcttgggcgacagagcaagactgcctcaaaaaaaaaaaaaaaaaaaaaaaaaaaggagattctgacacatgctatagcatagatgagccttgaagacatgctaagtgacagaagccagacatgaaaagacaaatactgtatgatttcacttttatgaggtccctagagtagtcaaattcagagagacagaaagtgggatggaggttgccagaggctgggggaagggagaatgaatgggaagttggtgtttaatggggatagaattgcagtttgggaagatgagatggatggtggtgatggttacacaacagtgtgaatgtgcttcatgccaccaaactgcacacctgaaaatggttaaaatggtaaattttctgtgatggatactttaaggcatgtatgcaaacacacagaagcagttactaccactggggttgatggaaaagaaaccaagaactcggagcgtcctccacaccttgccacgtcttacgttcaggccttgttggagagtgtgtgactgccacagaaacctgcagcctactggtaacaaaaaggttcttgccagaaggtgtagaaagagtggatctgcaggatcagcttactgggtagccgagaaacctactagagggtatgggtgggcaggagctgggtgtctgagaagtttgctgaggtcccattgggctagagctggggtgctggagaaactcagtacagagcaggccccactgggcacacgccactggcagctgtgccttcagaggaaaaagagaccctggaaccaggaagagaagctgctacctcagcaaggcctggcagctccccacagtgttgtcccctgtggatagagcctgacatgactgtatttggccaaggagaaagactcataaggcctcggtccagtatcacggagcggggcctggcaggatgtatgcagagttaagaggcaatacatgggtaactggcatatttttccagattctttgttttttttgttgttttgttttgttttgttttgttttgttttgttttgagagagcatcctgctctgttgcccaggctggagtgcagtggcatgatctaggctcactgcaacctccacctcccgggttcaagccattctcctgcctcagccttctaagtagctggagatgcccaccatgcccagctaatttttgtatttttagtagagacagggtttcaccatgttggccaggctggtcttgaactcctgatctcaggtgatccacctgccttggcctcccaaagtgctgggattacaggcgtgagctacactgcacctggcccatttttccagattcttaaagcagatccttaggtctttttttttttttttttttttttttttttacttcttttctaatataagcacttacagtttccctctaagcactagcttcagcctacgtattttagtatgctgtgttttcattatcatttcatttgaaatattgtaaaatttttcttgtgatttcctctttgactcatgggttatttagaagtatgttgtttaatttgcaaatagtcaaggctcctctgagtatcttagagctattgatttctaatttaatcttactttggccagacaagcatattttgcatgcttttaaaatttgagacttatggcccagaatgtgtatcttggtgaatgcactgttttcacttgagaaaaaaatatgtatatatattctagacttcctgagtatagagctttataactgctgattaggtcaattgctagttaccagtgttcttcagattatctgatgcttgtttctcagatgttgagagaatggtgtttgctatggcctacctgtttgtgtcccccaaaattcatatgttggagcttaatctctggtgcagtggtgttgggaattggggcatcagggaagtattggctcatgagggcagagtcatcgtgaatgggattagtcccttctgccatgtggggacacagcaggaaaaggacatctctgaagcagggagctagctctcaccagacactgagcaccctgattttggacttcccagcctctagaactgtgagcactacaatctgtttataaattacccagcctaaggcattttgttttaacatcctgaatgaactgaggtggtgttaaaatctccaactatgcatccaggcgcagtggctcacacctgtaatcccagcacttcaggaggccaaggcgggtggatcacctgaggtcaggagtttgagaccagcctggacaacatggtgaaaccttgtctctactaaaaatacaaaaattagctgggcgtggtggcaggctcctgtaatcccagctactcgggaggctgaggcaggagaatcgcttgaacccaggaggtggaggttgcagtgagccgagattgcaccattgtactccagcctgggcaacaagagtgaaactccgtctcaaaaaaaaaaaaaaagagtctccacctatgattgtggaattgcccatttctccctttaattctttcaggttttatatcatgtattttgaagctcctttggttaggtgcatacacatttatgattataatggtgtctcgatgaactgatcatttaaccatgatgaatgtattcctttatctcgtaataattttatcttggactcaactttattgatatttatgtagcctctccagccttcttaaacatgctgtttgggatgcataagaaggctggagaggcttatggagaaacttatgatggtttgacttacagtttttcaactttaccatggtgcgaacgtggtatgtatacagtagaaactgtactttaagtatgtgtgaaaccattgtgtttctcactttcagtacagtattcaataacttacatgagatagtcaacactttattataaaataggctttgtgtttgttgattttgctcaactgtaggctgaagtaagtgttctaatcatgttaaggtaggctaggctaagctagaatgttcggtaagttagatgtattaagtgcatttttgagatgatatttattttccacttatgatgggtttgtcaagacataactccatcatcattcaagcagcatcagtatgtctttttccaaacagaaaatttcaacctgtgtttatactgaaacagcatcttttgtagatagtatatagttgagtcttgctattttattcattctgacagcctccgccttttaattggaatattcaggctatttctgtttaacatagttatagatatgactgggtttagagctactaccttgctctttgatatttatttctttcatcttgctttcttggcttcttttatgttaattaagtattttttagaattctattttaatttatgttttttttttttttttttttttaagacagagtctcactctgttgcccaggctggagtgcaatagcatgatcttggctcactgcaacctctgcctcctgggttcaagtgattctcctgcctcagcttccctagtatactgggattacagacgcctgccaccacggccggctaatttttgtatttttagtaaagacggggtttcaccatgctggccaggctggcctcgaactcctgacctcaggcgatccgcccaccctggcctcccaaagtgctgggattacaagcgtgagccactgagcccggcctgttttgactttttaattgtatctctttgtattgctattttagtagttactttatagattctattgcacattcttagcttttcacagtctacttagaattaacattgtttttcttcatggaaaaaaagtgtaagaactaggcaatcctatgggttcatttaccactttccatcctgtatgtgatggttgttagatatttactacatccatacacattgtaaactagacaatacaataaggaaatttttgctttaaacagccccatgcattttaaagaaattaaaagtaaaacagaatcttttctatttgcccatgtatttgctatatcctgtgctcttcattccttcctgaagagctgagttcccatctggtctcatttcccatgatcttggagaacttgcttcacggtttttgtagtgcaggtttgcagacagctaattccctttcattttcacttatctgcaaatctttattttgctgtcattctttctttttttatttttatttttatttttgagacagagtctcactctgtctccccacaggctacagtgcaatggtgtgatttcaaaactcctgcccaatctcaactcaccaaccttctcctcccgggctcaaacgattctcctgcctcagcctcccaagtagctgggactacaggcatgtgccatcatacccagctaatttttgtatttttagtagagatgggatttcaccatgatggccaggctggtctcgaactcctgacctcaagtgatctgcctgctttggcctcctaaaatgctgggattataggtgtgagccactgtgcccagcctgctgtcattcttgaaccataatttcactggttatagaattctgagttgtcagttttttctttcaggactttaaaatatagggttccagtgtctttggcctccgttgtttctgtcaaggaatcagcattcatctagctattcccctgtagaccacatgttgtttttccctggatgcttttaagactttttatccaagtttgattgctcagtacctacctctgggcaaaaaagcctccagaaaccagaaacttatctagttttattcccctctgtcaggtgtagactctactccagcttctacctacttgagatattctatactgactccaggctgttgttattttgttctttcaaatattttgtccagagctataatgttttctgcagaattgaccagatagcagctactctctgtgaccaggagccttgatcttccagacttgctgatgggctcacaaagctcctgcccgtggccctcagttggcagtggcctctctgccttgaagttgccatgagtgtgtaaaacctacaggctcaaccttcctcattagtacagtccagaaaagtggaattcctggtctgggtggctatggtgccctagaccactggctagaccagggtggtgactgccagctggccgaatgtggggtctccagcctagcacccttggactctaccccaggagttatggctgtttcagggccaggggcctggcctcagcccctgtcccccttctcttctcctcaagttgcccagcatcaggtcccaaccagcatcttttgcagacagggtgggtcggctcctcactagaggggcagggttgggcgggaagcctgttgagccctccttcctgtgcagcccacagccctggggttagctccagaggggtgcagaaaggagcccccaaaggcagaaactcacccttctctctgttcttgtgcttccagggataaaggagaggtggtcctagctggggggctaccagtggcatgcaggaggcccacatgaccactgtttgctggggcctttccttctctgtgagagagacgagagagaggagagagagtgtgagtcagggtagtgtcttcttccagtaacgcagacttctgcacgtgttctctaggagaaatcccgtcactcgctagagctctagatctggaagaagctctgcctctcttctctcctccagtgcagtgtgtgtgtgtgtgtgtgtgtgtgtgtccccacatgcattacacccttctacagaggaaataattcccgtccaagtgcaaaggttgggattggagcaggcagcatgtgggctaaaggagcagagaggaggaaacgggggcgggggtgagggtgggaacaggaggtgggtagatgccacgaggcatgccttccacaactagaagggctggtggagatgaccagaatgctccagacagaccttttatcaaacttccaaaattcaatcttgtttcatgaagcctgaggaccctgcagagtgaaagacaaggaagggctttcctgcaggggggtgtgtgtgcctgtgtgtgcctgtgtgctgtgtgcccccatgtgtgtgcacgtgtggacctgtgtggtgtgtgcctgcacatgtgtgcacgtgtggacctgtgtggtgtgtgctgagtgtgtatatgtgtgtgcctgtgtgctgtgtatgcacttgcacatgtgtacacagatctcattttccttttttctggcttactaagtgccagaaagaatttccgtgagcctctccacccttcccaaggctgcacatggagggacttgcgcaggcacatgtgcgcgtgcacacaacacacacacacacacacacacacacacacacacacacacacgagtcaggggcgagcactcctgtggattgtacctaggcctggcaggaaaccgggttctgggaaactgtaggccccacctttggcagaaaaccatgtttttgttgctgctcgttgaagggaacattaagtggggctggggacagtttatgttgagaagagcaaattttgcctatggcactggggacattgagtggctcctgtcccgggctctggagggcttgggagacacgtctgcagctctgggcatctctcaaggtcacgggcggccacactcaaggttaggccctcctctgtgtgagctgcggtcagcaggaaggctgacctcagaggcggccccagggcccttggaggccctgcccctgagacatgggccaaggtcagagagccgagaaggctgctgctgaggactctggttggcgcccagcccagcggcccttcaggcgggccctgtgcaggggctgatgaagtcagctgggaaatctgtgaaataaagcacaggtcccccaggcttgcccagagccccggcatcagatgaggtgcagagaagggaactgagctgccaagtgtgaacaggagagaggagccccaggaccacacaggggccccgacatggcaggtgcttggtcagcagcggtgctgcccttactgctggacgtgggaaaatgcactgacacttgctgaccagagccggggtgagcatctgggtgaccctgcagatgagacaaaataagggctgccgtgggggaggggcccttgccgggccaccctgctgaggccctgtgttactgtcctgcggctgtcataacaaaggaccacaaatgaggtgactcaaaacatccgaaatcggccacgtgcggtggctcatgcctgtaatcccagcactttgggaggccgaggcggttggatcacgaggtcaggagatcgagaccatcctggctaacatggtgaaaccccgtctctactaaaaatacaaaaaaaaaaaaaaaattagccgggcgtggtggtgggtgcctgtagtcccagctgctcaggaggctgaggcaggagaatggcatgaaccttggaggtggaggttgcagtgagccgagatcgcgccattgcactccagcctgggtgacagagcaagactccgtctcaaaaacaaaaacaaaaacaaaaacaaaaacatccgaaatgtcttccctaaagtttctggagccagaaatcccagaccgaggtgtctgaaggttcattcctcctgggggttccgagggagactgtcccatgcctttctccgagctctgcggcggccagcaacccctggtattcctcggcttgcagctcggcctaccccccacctggccttcaccctgtgtctcttcttgtgtctctgtccaaactgccctctctgttgtctttttaatttatttttagggacaggttctcattctgtcctccaggctggagtgcagtggcgtgatcatggctcactgcagcctcagcctcccaggctcaagcaatcctcccacctcagccttccaagtagctgggacacaggcgcacgccaccatgcctggctaattttttaatttttttgtagagacgagggcccaggctggtctcaaactcctgcgctcaggcaatgagactttgcctcccaaaacactgggattagagacatgagctgctgtgcccagcctacctctgtcttataaagacacctgtcattggatttagggcccactctgattcaatatgccctcaaataacccaattacatcttcaaagaccctatgtccatataaagtcacattcataggtactggggggtcaggacttgcatatgtcttttgggggaacacaattcaacccacaatgggtctcacccacagaacgaacggcctctccagggtgtgcgcaggtgggtgaggggcccaggagagggacctgcgtggcaagagggcttgtgttcacgtcagagattccagaaggagactggatggggtggctgcatggagcaaggggctacagccactgtctccaagtagttggtgggttgtctggtagaaagggagcatttattttgagttcccccaagatatgaagctagtaccaggtacctggaaggtgctagcgagtagagcttgactctttacagaaagaggtgtttttctcacaatgttcacttgaggacggtggaacaggctatttcacaaggtagtgagttccccatgcctggaagcattcaagcaggggccatgtgggagttgttcaggagtgcatagaagggacctcagaggtccctgccaataccatctttgcttgtcttattttacgacaacttgaatttcagaatgtaatgttattggggatatgtctactagaggggcctccagcatcaggccccacacactatgcatcatttttagggcagggaatgagagcaggctccattctttttggttgtctgtgaggaccaggaggcttgctgctgaggcagcttcctgtggaaacagtgtctcagccccgcaatccattcatcggagctccaacatcttaatgaaacactgtgtcagatgggttctgggcatgtgtgtgcagattgtcacaagtccatgagaatgcacacacgcacattgcatgtgtgtgcacacatgtatgcacacatgcacaagaacacgaagacccgaggcaggtatagtccgtgagacagatccctctaggctgaaagactccccacaagggtccctagaacaaggctccagcctcggcagtccctcccacttctggtgggaggatctccacagagaagaagggtcaagaagcacagctcttgatgctcacggtgtaccaagctctgctttaagcttgtgtcttattttttacttatttagcaaatctgtcgctcttgttttgtgccagatgctgttctcagcactttacaaatattgatgcatgtttgtttcatgacaaccctgtgaagtaggtagtgttaccccgttttatagatgaggaaacaggcgtagagggataaagggacttgcccaaggtctgtctctaccttacacgcacatgaacgctcactcatgcggcaggcgctagtttccctctgatgtgagtcaggccttgagctggttggggtctgggtcccactttggttgtgttttgctgtgggcaccaaggaagcttctagcagcctcatctccctggtatgacctagctccagggactggatttccccaaatgctcctgcccagcctggagcctcctttccagctgggggagggctgaacgacccctcactcttggaggctgccggagcccctcctgcctgcatgcggccgctgccgggtggacaggcctgcttgtgggttgaggctcccagcagctggggtggatcatttctcctcccaagaagctttgggagaagcagctgagggggccagcgtcctcctgaggccaattccctgcctcccccagcgcaggcgcgaagccatctttgcttgtgtgtttgccacagacagtggagggcggtgcaatcgtgacgcctgcttgttgcactttgcgtccttgaggacgttgacccctggccggtgctgggcgcttgctcttcagtcatcttgccctgacctggcgtggcaggcccgagcactgctcttttacaaggaaacaggctcagaggccttgagtcacttgcccgggctcccccagccaataattggctgagccaggatttccatccagctctgtgactccagaagtccaagttcttcccatcacgtcagggccaggaaaggattagaatgcttttctacgtgccgattatttggatgatctgtgcagcttagctcgttgtagttgctcaataaaaatgtggaatgaatgggcctatatgtcccattgtgtgactcagagccaatgactctggctgatcctcctgttttcattccgtggcccagcatctccctttggggtgtgtgaccttggaagcagtgactctctccatcccaccttgaatggtgtctgcgccgcagcaggggagcagctggggattgccagcgcctgttgctggtgggctgtgcgccagatcccgtcttggatgtgtgggtgattgtcagccacatgtgtgtgaagggctgtgcgtgtaggatttgtgcaaatgtgcccctccctgctgccagcccatgggaggctgtcaagattctgcccctgcacattagcccacactctctttgtggcccactgctgtggctgttcccttgtgtcacgtggctgcaggcacagcccccaagtggatggggatcgtgggctgaatgtgcatcagatgctcctgcttcttggtgggtggagaccctcaacccatgcaccgtggctgccgcatctgaaaggccttccatggtgaaggacttggacctgagcaaccctccgcagaggtcttagaagtgctccctggccgggcgcggtggctcacacctgtaatcccagcactttgggaggccgaggtgggcggatcacaaggtcaggagatcgagaccatcctggctaacacggtgaaaccccgtctctactaaaaatacaaaaaattagccgggcgtggtggcgggtgcctgtagtcccagctactcgggaggctgaggcaggagaatggcgtgaacccaggaggcggagcttgcagtgagccgagatcgcgtcactgcactccagcctgggcgacagagcgagactccgtctcaaaaaaaaaaaaaaaatgaagtgctcccagctcttcctcctgtggtgaggttctgagtttccatcctcagaagaaaacctggctggggagggcatctctagacccggacataaacgccaggagaccagggctgccctctcaggtgaccaatcacagagactcagggaaagtcacgtttggaagaggcgacactgtgtctcagcctcattcatttctccatcctacagacactgcctggtgcccagcccgcaccgcgaggcttcctaagcagctctgggcaccgtgcacctggcatggcctccagccccatctccctgccttgggagacccggtggggactccgggctgagctcctgtggctgtggaaccttggtggtttattgtggtggctgagaacagggacgtggggttggacgggttgagtgtaactcccagtggctccgtgaactgcctgggagccttgggcagctctttctcactctgtgcctccgcttcctgatggaaaaatgggggccaggggggagcgaccttgaaggtattcgtgggaaccaagcgaggtgataaatgtagtgtccttggtagagaactggacacagagtccacccccatgaagggggctgctcctcctccttctatgtttcctcttgttcttatttctcctcttgtatcttctcttcctgctttccctccccctcccctccccccccacatgcaggcacactccatttggtgccccaactgcctttctccattgtccttctgtaagtggttctctaagtgggaactcaggcctggaaagggtgggcaccctgtctggtgggctctggcaggccaggcgctgagcagcctcaggagacacaaccctaggaaaaggctcatgcaggctggctgtcatgacggactgttggtgggagaggggaaggcgccgtggtaggggaagctttggaaacatccactagtggccttatttatgactcaggacacctgccaggtcactagaacacagctgaggaagctgtcggccagacgtccagaagcatcaacctggtggctgggctgtggggggacctctctggacaggcagacaaggtgtcggaggaaggggctgacactcactcagtgtctgtcatgcactgagggcacaaagggcaggatggagagctggcccacgccacctgtggaatcttccaggtgtgggggcagatggggaagcaagggggcttgaagacacatgcgctcattaaatgtccttaaatcccaagaagaagaacaaggacacatccacaggggcagggctgaaagtctgatgcatggtgttttggggtctgctcctgctgcaacagctacagtggctccctcttacctttctcttccctccattctgttgtgaaaatgttcaaaacacatggtcaagttgaaagcattttacagggaacacattcagccatcacctagattctaccactaacaccaagctacacctgctttatcacctcaccgtccatctatccctccttcgcctggccatgaatccattttatttttattttttggtgcatttcaaagtaatttcaggtcatcctgattatctctggaatcactgtcagaaattccctcccttcccctcccctctcctttcctttccttttctgagatgggatcttgctaggtcacctaggctgaagtgcggtggtgcagtcatagcacactgcagcctccaactcccgagctcaagcaatcctcctgcctcagcctcctgagtagctgggaccgcaggcatccaccaccacacccagcttcattttcaaaatttctcaccaactcctcactccttgtattcacccaggaccacttctcacaaagccagggtgctgcaggaggggtcagaaccccaagccctaatcctggctctgtcattaacactgtgcgaccctcagcaaatcattttgcctgtctaggtcctgttttcattcctatgaaacgagggcgttaaactgtatgttataaataatgagggctaccagttaccaagctcctattttaggccaggcacttttcacatgttattatgagtcctttcaatctaggtattgttctcaatggacagcttagtcaacggaagctcagagaggtggtgtaacttgccaaaagtcccactacccagtgaatgtccccacggggtctgcacccaggagtctgacacagagcccaggcctcagcacctggcgatgttttgggggtgtgagcagcccagcctactctgggcacgtgtttacttgctgttccttctgcctcatgtttgtgtttgtcccctctgaagctcagactgttattttccagttccaaataccaaaactggctaggcacggtggctcatgcctgtaatcccagcactttgggagaccaaggcgggtggatcacttgaagtcaggagttcaagaccagcctggccaacatggtaaaaccccatctctacaaaaaatacaaaaattagccagacatggtggcgtgcacctgtagtcccagctactcaaggagaacccagctacccagctactgaggcacgagaatcacttaaacctgggaggtggaggttgcagtgagccgagatcgcaccactcctctctaggctaggcaacaagtgtgagactctgtctcaaaaataataaataaataaaataaaataaaaattaaaaccaaatgccaaaaccaacccacaaaataaaccttggttaaagtagcctgttcattttgctttaactatgtatattgcaccagattctgccaggggctcagcgtataaagatgagacccctgccctgccagacaggtgggatgatggccataccttgagttagtcaaggcaccatctggctgtgtaacaaaagctaaaacatcagaggctgagcagcactcggacccacgtcccagtccaagtgtcagtcgttatgggggcccaggacagcccggacctagttcattcctttggtgcatcctcgacacacagcttccatctcttgagctgagatggttccagctcctgccgtcatgtctgcactccagccagagggaagggaagaagggagaggggaaagggcaagtgtccctctttatttttaagggcatgacctgaaagttaaacacttcagctccttcccactggccagaacccagttgtatggccgctcctgtcatcagggaggctgagcaatgtattcttcagctgggcttccctgtgcacaaccaaaacttcagttactatagaaaaaagggagctcagatattggggaaacaactagcatctgtaccacatgcactgatagctctctttgtatgaacagagctgtggcaggccctatgccagggagaaagtaagattggaaaagagcttaccaaggaggtggcatttgcactgtgcttaaggggcaagaaaaacgtcttccaatcaggagccacaaatgcttggctgaagtgctactgctctttcatcctggagctggaacagacgtcaccagtcaatcatgatggctgctgggtgcactggctaacatctataatcccagcactttgtgaggctgagggtgggaagattgcttggggccaggagtttgagaccagtttgggcaaattgcaagaccctgtctctgcaaaaaaatataaaatgtagctgagtgtggtggcacctgtagacccagccccagctactcgagaggctgagatgggaggatcgcttgggcctaggagttcgaggctgcagtgagctatgattgcaccactgcactccagcctgggtgacagagcaggacctgtctctaaaaacaataaaataaaatcaaagttttaaaatggaaaaaaaatcatgagcacataactccagatgtatcctcaagatagcaaacccgggtgggcgcagtggctcatgcctgtaatcctggcactttgggaggccaaggtgggtggatcacctgaggtcaggagtttgagactagcctggccaacagccccatctgtactacaaatacaaaattagctgggcatggtggtgggcacctgtgatcccagctacttggaaggctgaggcaggagaattgcttgaacccaggaggcggaggttgcagtgagccaagatcacaccattgcactccagcctggagaaaaaaagcaaaactctgtctcaaaaaaaaaaaaaaaaagcaaacccagggccaggtctgtagccacatggccaccttcttccctgagcatggaggcagcctcagaaacctgccccacatcacatcagtgggcagttgattgggtcagcctgccagttgaaccctatttgccacagtcattctccatagtaaggggcattctagacataccccccttcccagggaagaataagccgtagctgcctgagcgttttatccagtggtgtgcatgtcttttcccaactctgtgtttagtgatgtcctgtttgtagcttgaaatttgccacagtgggtgtgtttacaccacaggaattggcaaacactacatatcaggccttacctcctgctccctactagggtaggttgttttttttttgttgtttttgttttttgtttctttttttttttgagacggagtctcgctctgtcgcccaggctggcgtggagtgatgcgatctccgctcactgcaagctccgcctccctggttcacaccattctcctgcctgagcttccagaatagctgggactacaggcgcccgccaccacacccggctaattttttgtatttttagtagagacggggtttcaccgtgttagccaggatggtctcgatctcctgacctcgcaatctgccctcctcggcctcccaaaatgctggcattatgccactgcgcccggcctagggtaggttgttagaaatgtaccagcctgccagtttcagccttgtttgtctttcatcctttttttttttttttttttttttgagacggggtctctctctgttgccccccaggctggagtgcagtggtgtgatcctggctcactgcaacctctgcctcctgggatcaagtgattctcctgcctcagcctcccaagtagctgggattacaggtgcccaccaccacgtccagctaaattttgtatttttagtagagatggggtttcaccacattggccaggctggtatcgaactccttacctaaggtgatccacccgccttggcctcccaaagtgctgggattacaggcgtgagccaccgcactgggcctctttcgttctttcttaatgaaaatcttcctgaaagatttgcctactgatgtctgtgtcaataggtactgcctgcgggacagagcctgccctccttttgaaggtctttctctgtctgggtgaccatctgcatgtcactccctgctgctcagaactaaagatgtagctatgcctggggtaggttgggaaaacctgtgggaatcacagagcttgctgtcatgctgtgttctggatacctgaagcttggcaggcaggtgggatcgagggtgggcattaggaaagtgatgtggctctataggaaggggacataggtcctgagattttaggtccccaattggacaaagctgttttttttttctggataaatgttctagcttattcataatcgagtggtcagttttcttttcttttcttttctttttttttttgagatggagtctcgctctttcgcccaggctggagtgcagtggcgctatctcggctcactgcaagctccgcctcccaggttcacgccattctcccgcctcagcctccggagtagctgggactacaggcgcctgccaccgcgtccggctaattttttgtatttttagtagagacagggtttcaccgtgttagccaggatggtctcgatctcttgacctcgtgatccgcccgcctcggcctcccaaagtgctgggattacaggcgtgagccaccgcgcccggccaagtggtcagttttctcagctgccgggtcttgcacaccttgctggctctggagaccatatgcaccatgtagaccccatttgtttcctaccctcagtgttgggggaggggccaagggcctgtcgatgtgttgacacctggccattcactggccttgaatgtccacattcacctccttgaaatcgatgccccgtatcggaggctccatgtggatttgggggcagaggcctgtactccagatggtggggtggccttcaccaatcaggcagattccctgccctgccctgccctttgggctctgtagctccagatgtgtgctcaagatctgtggccacatggatgggacaagccacagagactcagactccgtggtccctgtgaccagagtagccgtggccctgtctgggaatgttcccaccctgttgctgaaggtgagaaatttctctgtgctggagaacagctgtgctgagaagttggcccatctggcttgcaggactgctggggcaagggaggtctgctgccggtctcttccttcctcctctgactgggtgctccttgtctaggttccttgcagcaaaagaattctctaatttattttgttcccttattgagtctctactccatgaagcccacctcctaatcccagctgactggctcccacctcctcaagaggaaggccaggggcagacgaggctgaaggaggctgactcccctgtgccttcgcagtctgagctgatgctgctgtatgttcacagggctccttcagcttttaaaaaggcttcaacacgttcgtcacacgcttgtggctctcctggatgccacactaactcagtaaggcctgagttagaggctgttcctgaggctgtgaaaatagaagaagggtccagaggagaatcccttcatctgacgatcccaggaaggcttcctagaagaagcagcctctgagctgagacctgaagacagatcaggcctgagtcaggccagggagggtgtgaggggcccaccaggcagagggaacaggatagggcaggcacagaggtctggcacctggcttgtggggaagtgtgagcccctgggcatgaccaaggcggggagaagtggcgtgagaggaggcagatgtggctggcaggagatcggcggccccggccttgctgagctccactctgtatgcaccaggtgacagaggctgcccaggacggtgggcagggaagtgacaggtcacatggtcatcccaccaacagccgggagtccagcttggggggacccaagaccctggggaaggcacgagtcaggggcctgctagagccaggagctagtgggagaaggaaacagtgttgcttatgaattataaacagacactcccgcaactttctctgacgtgatacaatctcaaagtgggccacccagaggtgggaaggtgacttctggctctccaggccttgggcctgtcttttttttttttttttttttttttttgagatggagtctcactctgttgcccaggctggagtgcagtggtgtaatcttggctcactaccacctctgcctcctgcgttcaagcaatcctcctgcctcagcctcctgagtagctgggattacaggcacctgccaccacacccggctaatttttgtatttttagtagagatggtgtttcaccatgttggccaggctggtctcgaattcctgacctcaggtgatccgcccaccttggcctcccaaagtgctgggattacaggcatgagccactgtgcccagccgagcccatcttcaagttctccctggccctcagtgtttctgtattagttcacccttttggctccctgcttttaagagtctcccttaagactgtccccaagtggacaggtccccagaaccaaggagcagccttaggagtccccagttacagacactccagggggtccgtgtggccctcagcctctggcctggttccggcagccttggtcctttgtgctgtctctcacatagcctggccagagctggccaggtcccttggctgggccgagtcatcgtggccagtgactcatgcagggggagaaaagtgaggagggggaacagagtgcgagggggactgtgttaataacaaacccattaggtccctgaggtcacttcacaggagggacaaatggttcatttaggttgatctggctgccggctggcttccagagacactcagggtggggaagatttcattatctggggaaagcaataccagattgtctggaggggcccagccagcgcaccccgcgcttcctgtctgcctcccacgcagagcgttctgttcccaaggcggcaggccaagagcgcgagccgaggctcaggtgcaaagaggggtgcggcatgggggcactgcagggcacggggtgcatgcatttttatttatttttttactgagtgttagggtaatttgttaatggggtatatttggtgacataaaaccttctgtcgattcatggcagtctggaacggagtggaagcgtcccactcctggggaacccccacacacatttggctgtgaacgtcggtgcctttgcactggagcctctttggagtgtgctgggcagagcggagaggttcctcttctctcttctccatcatcctgtggaggtgtcaacatgtagccagagatggtcagtggcagtgaggagaggggggcaggaagagaccagggctgggggcttgccagcccacagttctacccctgaacacccatggcctccctgttcaggtcagcgaggctgggggcagagacgggcaggggtcccccaatgttgggcatctccccgctccctcatactctggatttgccctctggagaaagctctggagcacccagaagtcctggggctgctggctgaggtggggagcagagcccagctgtgcctggaggctccccacttccactcagcttccagggacagtctcagctgtgcaggcccaggccgctgaggctggctccagaaatttcttcacaaccaccactggatggaaaaccagttctctaaagggccccagagccagttttgtttcttcttccacaggttcccatagttagagcatcgggtctttgttagagatgcagaagagacgatgtccccagcccttatgtggttcggtctccactgtggatgttggtgatcttagtctccttctcaaaaccaagagggctgatgccccacattccaggcccccagaaagagccgccacccacccacaccgctacatcttctttccacttttctgttccggaaagagtagagtggatatgcgctcctgtagaaatccatctacagcctgactgcagatgtattttgctcccttattgagtctctgctccatgaagcctgccttgtttgtacctctttctctctctttctctctttcttccctctcttccttcccttccgttcccttcctttttctttccttcctgtcttattctttcctctttctttctttcctctctctctctttccccctttctctgtctttcctatcttttctttctctctctttcctcttttttgaacagccaaagatagaatgaatggcataggtaggtactgagctccctgtaactggaggtgttcaagtgtagggtggatgggcatttatagggcaggcattgaggaaggatctccctgggattgtggatggcaggacaggccctgtggagccttctgagcgggtgcagaagagggagggcatgttcctgctccctgcccttcccgggttgccaggccgccactcccaacctccaccctctttccttccacctgctgggccttacgggatgggcagaggcattgttagaacatggagccgcggtccacagagggccagcagggaggagagctccctggggaccacgtcgcctcagtcactgtggtgactttgaaaataaatgctttcttctctgcttgagtccctgttgttcctgctgacgtggaactagggcaggctggtgactcagccctcatccctgcactgcatcggtggcaagttgcctccagcctcagaccccacagagcagggtgccttcttcagaaaaacagtagggaggccaggacaccaagggccccagggacagcctgtttctcctggctggcatgagttctagccaagcctcctggtaccctgggggtgaggaggtaccagctgtgtgctttagtcactggctgctttgaggctgggtcggtgccaggctggccactccttcttgtcccctagtgtgactttgcagagctcccggaagggtcagagggtttttttccatcactggtgtccatgggatactgtgtccccatctcatttttgtactccagtctcagacgggtgctaggaagttggagactttagccatttcacgactgtgtcttgcggggctggagtaggaacaggagtaggaggaacgctctggtcatgggactgtgtgaagagagaaggatcaggaagaaaacatgagctatcatgtctgggttatacctcagcagagccgctggtggcctcccaggcatctgaatttactaatcacaaagctcaccaggtgtgcaaataaacaaatgctgttcaggaggcacagccagggttctgctggagagggatcatcttggaggggtcatactttccacccagtccttcagtccttctgtcctgtgtgtgtgcagcccctgaccaccaccatccctgcccctgccacttgctcccagggttccatcaggttggatgttattgcaataaaatgtagcaacagaaggtccaggcagtgctgcagtccctggtggtatcatcagagccagcaggcagcagggctggggaactccaagctgattcagtcccaagtgccggagcggggagctcggatgaggtgggggtggggaaccggggagccatggagcagagcatttgctgtgctgaaggccaggagcctccttgggagatcatgaatttagaacactaatactttgtttaaaaagtcccctgccttggagataagagctcaggccgctgtggtcaggttttgctgtaaatgttctgcacaaagcaggctggggggatcactgggaagtctggggaacagattggtcatgtgcttctttgagtgaaaccttatggttgcattgaagcggccaggcagagggtgtgatggggtgtggtagctgcacaccggctcagtcaggctgaatggggaaatgcaaactcaggtggcctgaaagagacttagtggtccacagcctggtggctgctcccagtacaggtgatgtaaagagagaaggggttccgggggcttggcccaggtggaaaccatgcactgtctgtgatcctgggcatgtcgaggctggagcaggtctgcttggtggctggcagaacgcacatgaagaatccatgtgtgttctgaacgtcccctctgcccctttgggctcatgccccatcaggagtctcccgactctgccattctgcaaaggaaactgcgctttgtcattgcacaggatcgaacaggtgtgtgtggagtccctaaagccactgtctcaaggggtctcatgggacaatgggagagttgctgtgatgtttaagactaaagtgatggctgggcgcagtggctcacgtctgtaatcccagcactttgggaggctgaggaggatggatcacttgaggccaggagttcgagactaccctggccaacacggtgaaaccccatctctactaaaaaaacaaaaattagccgggcatggtagcgggtgcctgtaatcccagctactcgggaggctgaggcaggagaattgctccgatctgggaggcggaggttgcagtgagccgagatcacgccactacactacagcccgggcgacagagtgagactgtctaaaataataataatgctaataataaataaaataataataataaaataataaaagcaaggacttgaacaaatatttgcacacccatgtttgtagcagctttactctcaattgctcaaatgtggaaggaatggatatacaaagtgtgtgtacacacagtggaatatcattcagccttcaaaaggaacggaattctgtcactacatgtgaaccttgaataatgaaccttgaagacctcatgctacgtaagcctgtctcacaaggacaaatattgtatgatttcacttatgtgaagtcaaattcatagagaaattggaatgacggttgccagcagctaggggaaggaaggatggggagttattgtttaatgaggacagagtttcagtttgggaagttggaagaagtttcggaggtggatggtgttgatgggtgtacaatgtgaatgtacttaatgtcactaacatggaaacttggttaaaatggtaaatttgtcttttttgtttttgttttttttttttttgagacggagtctcgctctgtcgcccaggctggagtgcactggcgtgatcttggctcactgtaacctccgcctcccaggttcaggcgattctcgtgcctcagcctcccagagagctgggattataggcgtttgccaccacgcccggctgatttttgtatttttagtagagacagggtttcaccatgttggccaggctggtcttgaactcctgacctcaggtgatccacccaccttggccttccaaagtgctgggattacaggcgtgagccatggtggctggccaaaaatggtaaattttatattacatatattttatcacagtaaaaatgcattgctctattagaaaaatgatagatttttacaatatgaattaaattacaagttatgaaggaaaaattaagcaaaacattaaaaaattacttataagtaattatatttaaaacaaaagataataaatacacaactttcatcacctcttaggttttttgcaacatttaactattgtctgtcctgttgcggttatgttcttgaggttgtatttgtatgatagaaacactatattcgtggtgactaaacatctcttctcagtctcacctccaatgatgtcatacagataacttgaaattggccggctgggcacgatggctcatgcctgtaatcccagcactttgggaggccaaggcaggcagatcatctgagttcaaaaccagcctggccagcagggtgaatcctcatctctagtaaaaatacaaaaattagccaggagtggtggcgggtgcctgtaatccgagctacttgggaggctgaggcaggagaatcacttgaacctgggaggtggagtttgcagtgagccaggattgccccactgcactccagaccgggtgacagagtgagaccctgtcaaaaaagaaaagaaaagaaagaaattggccaaggcaggaatattgacaccacaggaataggcaagcgctacaaatcgggaaactgagtgttgttgcttttgctggccccaggtggccggttgttgaccgttaactggcacactactggaggagggaggttcagactgattcgcagagagactagaggtagaaacgcaccatggtttggatgctgagggtgagggaaagagaggagtcaacagtggtgcccggagacttggcttgagcaactaggtggatggtagcaccgtttcctaagatgaggggctgtgggaacttgaggggctgtggaaggctctgccactgacggacccagggctcggcagctctgggaggcctactttgtgtcaggccacgcagagataagaccatctgggccctgcccttgggaagtctctgtctatgaggacacagcctgccacctaatggggtgtcccgtctggagcctcagtgttgctgggagaaagcccctcaccttccttcgctctccgagcctcttttgcttccctgccagctgagcctctccatggaggctgtgcctggaggggggtcatggatatggatgtgtgcgccaaacgctgcttcctcgtggatttcctccccactccgttcccacgctttgtaagcttcatttccccggggcctgacctgtggggtttctctccagacctgctccttcccatttccagaaaggcgtgcaggggtttcctatggctctcttccctgtccccatcccccttcccttgggacagtgatctgctggacgggtgggctacccacagggtttgtgattgcttagacatctttgctgtatgaagctttgacctcaaggcatgatgcagatgggaataaggcacgagtttctcctggctgctgtaacaactgtcgaaactgggtggcttatagcaaggggaatgtgtcctctcacagttctggaggccagaagtctgaaatcaaggtgccagcagggccagcttcctctgaagactccaggggaaaacctttctttgcctcttccagcttctggtggccccaggtgttccttggcctgtggctgcatcactccggtctctgcctctgtcttcacaaggcctttttctgtgtctctgtactttcttttctgtctcttagaaggacacagcattgaatttagggcccaccttatcttgagatccttgcctaaattctttctgcagagacccttaaacagaatcaggtcacatttgaggttccaagtgggcatatctttgttttgggggggatcaccggcccactgtaggtctcgttgtgcactgaagacgcaggcggtccctttggccaggcctgcagtcggtcttgccttcttttgtgaccgtggaagaatgcaccttgctggatgcacaggcctttatagttcttttgttcttgccaaatttcagctcagtttcctctctgctgccggcgtgcatcttctctgcccagtgccccttctgggactgtgtgtccaggccctgaggccctagaaaaggggggtggagggcctcctcactatcctgtagcaatgaggcctcattaaaatcctggagccccagactggacccagcccttagctatgatcaaaggacagctcgggatatgattaaagggctagagaaagatgatttaggctgagaaagaggaggccaaggagcaactggattgtccttgaatgtggaaaaggtaattatgacttgaagggtggtgcccagctgtttcccatctcctctgaggacaggaaaaaaaaggaaataaatgatgtacaattagagcagttggttagatacgagggtgaacttcctggctgggagtatggccaagccctgatttgggtttcctgaaagagctcggggaacctccttacctggaggtttctaggcctggtcatgtggctctgagtgattacattgaaggggcagtggctggggctggagccggtgggctctgagcacagtcacgaaggcatgcgcactttctggctgctctcctgccattgtcccttgggttcccattttggtgaggcgtgcaccctggcggcgctccccagggaactaaatatgtttgctgcactgtgcgtggagatggagaatgtacaattggctgaccctgtgctaatctggtggaactccatgccagccctgggaaagaacaattgcatgggtgtgtccacactcaccaggtgctttttagaaaaacactcgagaataatgctgtggcttaggatggctgttgtgccggacccggcatcttcccaggggggctgtgttgttgggctgagtttcttaggtactggacccccaaatccccaaatacggcgtggacaggtggcccagtaggggctggactatccgataggcccaggtgctggagttcagacaagacataccctggcctggcgtggaagatacggggtgctattaatggcagcaatggctgcatttctgaaacccgggctcccaggccgacgagggtgtgcacgcatctgaaatgtctgtggttttgcagttcccatgtccacaaactcacttggttgaaaatagttcaaaatatccaaagcatgagggagggagtgcctgcttttcttaaaaaggaaggacttgatttcatctacttaaaaagccacccaaacctagaacattttccgcaagagaccccctgccccccgcctctccagaatggctggagagtctcagcactcctgcacatttgggatatttcagagggggtggggaggggcaagtgggcagcgagcgacctcagacccaggatgagctgtcaggcgctccccggccacacattcaagggaccggagtgcagttgtagcgttgcggcctgctgcttcgggggtgggggtgttgttccatgctgtgaattctcacatggcccctgactctgggcagaggccgagggtctaagggacggggtgacagggagagcatgcaggagtgggtttctggctttccagggcgagtggaagaagcgcctctctctcttgtaggtgacagacctggggggcccttcttgaggatgagagcctgttgcttctcaagttctgtgtctaacccaggtccccaggtctaccccagcccctcggccctgcctgccttgtggatgatatagtttaagggtagagaccgctggcctggagggaaggctaggcctcaggttagggcccagaagggagggagaagcccttggggcagctccctttctgctcactcactgcctagctccttccttcacaccttccttcggaaacgtctgctcctgacaaggtctacttcctgctctcaggaggcccttattgtggaggaagggaggcgtcgcccgtccctggcttctctgacagccgtgttccatccccgccctgtgccccttctcccggacagtgccttctccagggctcacccaggagggtgcagcggtggcccccggggcggtggtcgtggtgggggtgttagctgcaggggtgccctcggtgggtgggagttggtggcctctcgctggtgccatgggactcgcatgttcgccctgcgcccctcggctcttgagcccacaggccgggatcctgcctgccagccgcgtgcgctgccgtttaacccttgcaggcgcagagcgcgcggcggcggtgacagagaactttgtttggctgcccaaatacagcctcctgcagaaggaccctgcgcccggggaaggggaggaatctcttcccctctgggcgcccgccctcctcgccatggcccggcctccacatccgcccacatctggccgcagcggggcgcccggggggaggggctgaggccgcgtctctcgccgtcccctgggcgcgggccaggcggggaggaggggggcgctccggtcgtgtgcccaggactgtcccccagcggccactcgggccccagccccccaggcctggccttgacaggcgggcggagcagccagtgcgagacagggaggccggtgcgggtgcgggaacctgatccgcccgggaggcgggggcggggcgggggcgcagcgcgcggggaggggccggcgcccgccttcctcccccattcattcagctgagccagggggcctaggggctcctccggcggctagctctgcactgcaggagcgcgggcgcggcgccccagccagcgcgcagggcccgggccccgccgggggcgcttcctcgccgctgccctccgcgcgacccgctgcccaccagccatcatgtcggaccccgcggtcaacgcgcagctggatgggatcatttcggacttcgaaggtgggtgctgggctggctgctgcggccgcggacgtgctggagaggaccctgcgggtgggcctggcgcgggacgggggtgcgctgaggggagacgggagtgcgctgaggggagacgggacccctaatccaggcgccctcccgctgagagcgccgcgcgcccccggccccgtgcccgcgccgcctacgtgggggaccctgttaggggcacccgcgtagaccctgcgcgccctcacaggaccctgtgctcgttctgcgcactgccgcctgggtttccttccttttattgttgtttgtgtttgccaagcgacagcgacctcctcgagggctcgcgaggctgcctcggaactctccaggacgcacagtttcactctgggaaatccatcggtcccctccctttggctctccccggcggctctcgggccccgcttggacccggcaacgggatagggaggtcgttcctcacctccgactgagtggacagccgcgtcctgctcgggtggacagccctcccctcccccacgccagtttcggggccgccaagttgtgcagcccgtgggccgggagcaccgaacggacacagcccaggtcgtggcagggtctagagtgggatgtcccatggcccccatccaggcctggggatatcctcatccgcctcccagaatcgggccgtgggggacagaaggggcctgcgtgcgggcagggagagtattttggctctctcctgtcttcggggtttacaaagtgtgttgggacttgcggggctgctctgtccaagcctgggtctggcgtccgcgtctctgagcctgtgagtgcgtgcgctttcctgcgtcctcttgactgccggtgctggggctctgcgtcctgcgtccgcgggagtaaatacagcaggcgaaggggaagctcacacaatggtctccagcgctctggggcagggcttctgaggggcgggcctgcctctgccgggacctggagcccccgcccctcggagaggctcctaggctgacttgggcagagccctctggtgggccgggagggggaaaggctgtgttgaaatgagcaaactgtccaggtgtcaggccaagctgggaggtgaccagcctgaggtcctccccgctccatggccagaaccagggctgacatctgggtgtcctgagcccagctgcccacacggcccacctggggtcagccctatctgagtgggggaggcggggcctcctgggggaccagaactttggctggacgccaagcagagtgccagtggctgttcttcagggctgggcctgaggagggtgtggggcggcgaagggacgggagggggttgtgatccagtggccactggcgctgtgcagagtgtgagctggaaacatcgtagttactttgtcagcttagtggtgaaagccctttttcaggctctatccctttgcatccctgcttcccagagggaggggaggtctgggtctgcagagctgggagggcttgctgttcccgcccccctcccccacaacacctcctcatctggacatctttgggcacatgctcatactggggtctccctaggtccactgtgttccgttgagcctcctgcagtccccgagtgaatgtgacctccctgcccctgcctctttgcaactcctccctgcgaccgctcctccaggggccttccttgtcccaaatgtccaagtggcacgacttagccggtctgaccactttccagtaagcccttatggagagaggccctgtgttgtgcagagctctcctcctgcctgcgggatcgaggtctctgctctcagttcctaacagaaagtgtcgggcccccagtgggatttctggggaagaactctcgtgtctcaacgggagccctgtggcgggaggggaggccagggtttggggttgtgttcgttgtacagctgtcaccatttgcactatgaaagttgttagtgccccttccttgggtctctgggtgtaactccacccttgcccccatgtgcctccatctggagctgcttctgcggctgtctcccaagccagttttgtgaccctgtaatttagtccaagacaatgggctcattgagaccatcctggtgcagcagttggcaatcctttggctctgggggaaggtttctcagtctcggggagtggggcctcaatctgctggttccctgtgtttatcagtctcccccttgtgtgtcctgaatggttttgctgggaattctggtcttagagccatcaggtggcccgagtcgataggcgtgagagagtgtgtgtgtgcatgagtgcgcatgtgcatgggggctgacctggggtatggaaaggtggccctccctggtgcccaaggagcctggagtatagttggagggtgtgggggtgtgtatatgggagttggacaaccttgggtggacagacagacgtggggaagggatgattgaaggaggtggaggagagagtgtgattcagcccagccaggggtgatgtggacaggcagcttccgaatcagggtagagaaaagtcaccactagctagcaggggagaagtcagtatggaggaggcggaccttgagggagagtaggaattggattgcaagaggaaggagagccttctggccagcagcagccagcagcagtgggggaggctggaatgagctggctggagagggggctggggcataaggaggggcctgcctgtgaagatcatatgggccaggctgcggagggccaggcatgcccgccgggagtgcagctggtccacgggaagcatctggagtggctgggaatgggcgcaggagcagcgccgtgggagcacaggtctctttcccggggcggctcacctggtgtcttggttcctgcaaggtaggccgaaagggtggggaggaaactgccagctccttacagcgctgggatggtggccccagggttcctgaggccagcggatgtgggtgcctgtcaccatgtgggttgctgaggggcggagactccaggggccaccccaaagcaggacgagctctgagccacggcatctctgggggcagttttccaatcgagcagacgtctaggcctggaatcctgtaacagaggccacagggccctgatcagggtgttctgggaggcttagaactagtggcagtatacagggtagacggcaagtgacctggcatggggaaagaggcaggtgcccaggccggcacagcacacccgtaaggaacaggtagacgggaagccgtccgtgggcctgtgtgtgtgctcggagttaaaattctgccaatgtcccatgtcctgggcacatctaccccctccctggggagcacctttctcttcaccttttccttccccgcctgtccccttcacccagggccttccccatccctcccgtcttggggaccgagggcaccatggctttatgttccatcaccgatgagttgcacagggattcagtccttccgctgttcaggccgggtccttcaggctcagggttcccaggaatggagagggtatcagtgtcttccatggactcaaacttcccgcatcccgcctttgctcccccttcaagataggtctccgagcttcaaggttttagggctctgtggaggccgccacgtagcagcaaggagaatgttttgtatttggctgatgagatttttagagtctcattttctacttttccactgtacaaacgggcctccaggcgactgcagcacccgccactgcccgtaatagggtgacaagagggatgaccctttcctctttctcccttctggttggtggaggcacggggctggcggacggcatgtgctttcgtgaattcaggccaaatctgttatcgcaaacacgattacaactcgggtctttgtgtaacaaaagcctttccaagtaccagctgttggcctgctttgctcagcggtgtttgctgtaaccagatttgcacaccgagaaagaatccaaaagtccttgatgtttgttgaaacaatctggcccaggacccacgtgctcagatcccagagctgtgtggcatctgagcttctcccgagcccccactgtcgcccgaggaggacccccagatctgtgttctggaggcagagcaggctgtgggacgggcttctgggtgggaaggaccatgtggatatgccttcttgtctgagagtcccaacacctccgggacgtgggagctggcgcgctggcaggattcaggtgcctctttcctctctagagaaaaaggccccgttgcttggtaataggtgcagacctgtccctaattaatgccagtaggcctcttgcgtgatgaaccctgcctttcagccaagactcaaggcatcctgtgaatactgcctctctgcagtttgagcttttgtggtgggaggcaggagccatggggagtgggggcaggcctcttacacgggtcccacagccactggcagcactgacttgatgctctttgagttcagagcccagggccagacagacccactgtcccgactacgagttggttcatttagaggggggcggacacagcacccaggcagcagatgcactgtgatcagccttgcagcggggctgtgggttctctgggctggatgtccgggaagaggcaggtggaggtaaacgccaggacacccctgcagtgactgggtgactgcaggctggaaatgctttctgtgggctgtggctgtccaggaaggttttgaatggggctagtggacagagtttgcatccagaggggcagtgctttggaggagtgaggggtatggcagtgtagggatgcccaggccgccctcactctgccattggaaagctgggcggcttcggtttcttcagtttcttcgcctgtttccctgcctgcaaagtggggttagaaacagctctctttgagggttgctgggggactctgagatgcagcccatggcgctgagcacgggtcctgcctcctacgggtgtggtgggtgtcgcggctggtgtggcatctgggcgggaaaagggggcatttgcaaaggacaggtaggtttggatgcttaaatatgcagatctggggatgggaggtctcaggcaagggcctgtgtgatgccactgtatgaatgaggccggacagcatggtcaccactaattatggaaagcacggcagacactagtgccagtagcgcccgcctgggggtccctctgagcccgacaggtactcaggctcccagtgcagccatgggaccccccttttcctgcctggctgacattctggaggctggcgtcatgttggctgcaggttcctcttactgggaggttgtcctggtcttccctgccaccatctacccccacccccaccctggagtgtcacagatgggtggaccatatgcccatctgcagggccaagcgctgacaatgaggtgagcacttgctggatgaccggaccatgaggacagcgggggcgctggcagcctgcgttcggctctgcaggctggcctttccctgaaaagcggttgtggcagagtgtgcatcccagggagtggtgcctgctgccctgaacattctcatccagcaggcctctgcaagggcccagtcaagtgtggtgcagagctgggctggcagctggaacagtctcatcttgtctagtggtgagaccaagggctgatgggccaaggctgcgtgctgcttgcccagcccgtggacccatccactgagcacccccatacccctacactgggcccggggtgtcaggaggtggaggggggactgggtgcctggaaaaacaagcccaccgagagcctgagcccccaggggtcagtatcaggcagtcaccacggtgcccggtacacagtggccacctggtctcgtcggctgtcttggtggtggagagcgtgcatggtggccgtacgtgatgggcatcacccagggtaatacagatatgcagactgtgcatttgtctgtaggagccagggacttctcagcctggcaacctgtgacctctgcctacccgttgggagagaggtgctgttccctgatagcctggtgccgggagagcagaactagggtctcctcctcctttctccacctcccatttcttacatgcccaggcatcaggggaggtcacactcagggatgagtcttggccactgggttcagggcctcactgttgccatctcttccctttgccagccagccaaatgcccgtccatcatcgtgccggggatggggctggcctgctcctctgaagtctccttggtgtatagcctaggctggagccccggacgattccgccaccccctcccccgactttttctttttattttgattcatcccagaaacccagccaaaaaccaagttcctgtgctctcccttgacaaagccactgaggaaaaatggtcaaacactgcctttctttccaaagccctcttggtttttcccaaatttggaggctctgagttgcttatgagaccaaagggtccggaactctctggaacacagtcccagaagtgggaggatttgtcatctctccagccaaacagacccaccagttggcccctagacacccccaggcgcctggggcatttctgggctcaggctgtttaatttggtctgcagagccccgaggctccgtttagactgggccagcagacagttctagagacttcaagtttgttgtcgtttttaaaagtcctgccaatgcccagaaacttagagggacaagaagatgacctcgatgtcagccgggaccataaacagtgaggcccgcccccccccccacccatgcctgcctccactgctcccgtagctgggtctccaggggattgcccgtggccatgggggaggccgggaatgcggggctcagactctactgggcttctcgtatttttttgtttttccttgtccatcttctttctcggaaatttctgaatatccccctacagcctttggcattctgtcactcctggcatctctgggccaactgggaaagccatcatttgtccaatatccagaaaatcaaggggcctggccttaaatacattgcagtgccctcctccccacatggcatcgaatttcctgtgtcctcaaagccaggagcctgtgccttggatgtgggcgatggagccttgcagacacctggagcggctttcctgggagagtctccctcgccttcccatccacccgcttcccctcccctgccccaagctctggtcacagcctcggaggggtcatctgagtgtaggttgcctccaggtgtacagttggaggggggcagttaccccacatccccctgtctgctaggggcacccccagggactcaggtcttgagggacagcggaagggtggggtggggagtaggccgttgtctcgtgccacctgggtgttatgtagactctgaatgggcagttcctgggagctggtttttccttctcaccccttctacagtgctgcccctctgaggggctggagctctctggagccctttgcagcctgtggcaggtctttctgattctgtgcctggtttcgcagcctccaacccatagccagtggcatgaagaacattcctggctgtctctacctgtggcctttgcaggcagcagttccctggggcagggcctgggggtcctggcacctccttgtgggaccccttgggtatgagggagggagccacctgggccacagatagacccccttcctgtatccaggaggttcaggatggacctgtctcatctttctttctggtgggaagagagcattcctggccatggggaatgtggcctggacagagccacctagcctctcccctcccccaggcagggccctgaaagatggagatggctctgctcctgccaggtcaacagccagcagtctggtggatttccatgcagtccaggcaggatctccttctgtccccaccccccaccccatgtgcaggaagctggttccaagcagggacccttggccccgctttccacgtgggtgggcagtttccctgcgaggggcaggccaggcccctgccctatgtcccccagagaccgatgttatctacagtaagagcatacaagtctttttggctccaaaccaggcctggaggggtggtcttctcctctgtcctctgcctcttgccccccattaaaggtcagggaatggagtgctctgtatgtttgctggggttgggttttttcctttggtttaaaatgaagggctggaatccctggtgcagactgcacggtgagaggtgctccttgggatccactcgaggagcattactgctgaatgccctgccaggccaggagcatcgctgggggtgggagaggcagttggcttatttgtttatccaacagccatccatgggtaccccaagggccagctctgttctaggcactgggggtctaggcatgggctcaggagaaggggtagaacgggagggcttcctggaggaaggcttcctaaccagagaccggggtaggagtttgccaggcaggtgatgctggccagcttctcttgccattttccttttctttttttctttttctttctttctttttttttgagacagagtttcgctcttgttgcccaggctgcagtgcagtggcgtgatctcggctcactgcatcctccgcctcctgggttcaagcgattctcctgcctcagcctcctgagtagctgagactccaggcacgcaccaccacgcccagctaattttttgtatttttagtagagacaaggtttcatcctgttggccaggctggtctcaaactccttacctcaggtgatccgcccaccttggcttcccaaagtgctgggattacaggtgtgagccactgcgctcggccttctcttgccatttctgcagactcatagtgtgtgtggaagactgtatgtctgtgcctggcacagctgccctcggcactcaggtgggaggtgggggagagggctgttggtgccagcacaggtcatggcatgagacaggctcccgcagccaagcggggtgcaccgcagcattggaggggccctgctgcgcacgagatccaggctctgcatctgtcctcctccccaggaggcctggagggctgggagggaccagggtggtgaaataacccaggtgggagagaggcactgttggagaggcagagggagctgcaggtttgtagcagcgagctttaaaccctgggcctccaccagaaaacctcagaaagggctgctttgcttttttttctaaactacaaaagaaacccttggccgcctgggccccttggggtcgggtgggggaggagatccttcattcgcacctttgcaggcccagtactgtgcagagggaggagggtggaggcaaaggcgagggaggagggtggaagcaaaggcggggtccctccctagccccgctgccctgcctggttgctgctctcagacccctactcctggcccggaaacatggaatcttgggacagctggggtagggggcacagaacggagaccctggtgagggaggaactctttctccagccctggctgtggccacagcaaggccaggctgggaggacctcactcaaatatttacatctctcctaatatttaaatgatgaagcaggctcctgcacacagctgccctggagccagctgttgcctgccctaccctccctctctccctccctctttctttccctccctctttctctccctccctccttctctccctccctccctcttgcattctttgtctctgacccaagtccaggcccttccagctgttctctccttacccacaggcacctcctgtgactgagcttctccttgttatttttcataaccatttcctttaattgagcacctcctaggtgccaggccctgggctggtactttgtatacaaggtgtcttttaatccccacgagagcccaacaaggtagattgggctgctgaggctccagcgctggaaggccggcccgggtcctcccagtccgcacctgcatccatccatcactcccccactgtggagacctgttccctggcccctggctgagcacgatggaaatctctgtctactagtccttggagagtggggatggctgagggtcccgaccctggggtctgacgggggctgcctctgccccacttcagcctggctgctcttccactcaatgactgagtttgcaaaaccagaataacagtgctacctggctggtactttgggtggctgggaggcgtgggagagggtgcacggaggggctgagcgaggtgtcagcatcgtggggatctccgagggtagccttcccaggcccagggcggagtgtaggcagagggcgcgatggcccagcgtgccggctcacatctggccttgcccttgcccacacggcaatgtgggggagtcatcagcctctcagtgcctcagtttcccatctgtgcaatggggacaagagtaaatcactgtcttcaggtatggtaagcactcatacacattgactattgcagaatgaacacagtgagcccttcttaggcttctactacatgccaggcagggtgccaggccctagtggagaggggacaatgatgggcaagctggctcctgccctcaagggctgtcgagcagggaggaaggcggcggctgccctgactgtgacccggagtggggtgattcgcaaagaggctggcgggaggctggctgggggctggctgggggctgctccctctcctgcctgtgttccgtggcagggtattaaactggcttttttcatggatttccgaggccctgactgtgggacctcgggcaggttttgggaccttgtgactttgttcccgcttgtcattcaggcctttgtcctcagcagtgcccagcacacggcgacttctgcatgtccttcagtgtgtgactgaccctggagctgagacttggcagctgaggctggacattgtccttggataactcccggggaggtgggggcagggtggggctgtgagctggcaactccgagtccctagcagcctccgaatggaggctttcctcttgtaggattctcggggaggaaggaggggatgggggagatgaggcttgtgagtcttcaggagggcagaggttcacacctgcagcgccccagaaacactccggggtgcccaggcttacccagccctcctgagccagaaccaccaagagttggggaccagcagtccattttttagcaagatccagaaatgattctcctgaacagtccgagccaagaatgacatatctggaatcagaacatcagaactacagaggaatcgagagaacgggcccaaaatgtgtagggacctcagccacatggcgccacatggaggaaagcacccaacatcatcactgtatgaacctgtttaaacacacacacacacacacacacacacacacacacacacacacacactccccagtaaagagtggaaagacatttgtcagaatattgatggaagttacctgggttgtgggtttatagattttttccctttgtttttgtgcattttgcaaattttcggctttgtgcctaaattccttttacagtcaggaacaaagcaatagatgttattttttaaagttcatgggctcgtgcccgtaatcccaacactctgggaggctgaggcaggaggattccttaagcccaggagtttgagaccagcctgggcaacatagggagacccccacctttttttttttttttttttgacagagtttcactgtgtcccaggctgaagtggcggtggcacgttcttggttcactgcaacctctgcctcccaggttcaggtgattctcatgcctcagcctcctgagtagctggattacagacactcatatttgtaggatttgagaatcctacaagaggaaagcctccattcggaggctgctggggacttggagttgccagctcacatattttttagtagagacagggtttcaccatgttgaccaggctggtctcaaactcctgtcctcaagtgatccatccatctcggcctcccaaggttccaggattacaggcgtgagccactgcgcccggccatgggagaccccctcttaaaacaagaataaaaataaaaataaataaaagtttactgtcaaaaagaaaaacacatcacccaacctaatctccccctaggattgagagatgaggaagcagaggccggaaagtgtcacattccctggtcgctggcagtcaggggacctgaggcctgggctggttttctcgtgctccaggcctggggtgtcaggtggagcccctgctttgcccaaaggtctaggtgcctctgccagcactgcttgcttctgcatttttggccacaaggaatgtgggccaaaggcagggtccttgacctctgcccaggagggtgaagtgggctggtcctccttgtccctgctccaaggcccctgcggctgtgcctttggaaactgctggcccgagctagtgtgcggagctgggacagacctcaccgtggccctcgtggggtcattccatgtccgggctggaagggatctttcggtccagcccttcctgttcctcatcaggaaactgagaccagagaggtcatctgcctggcccggggtggggtgtagatggcgcttgtgactcctgcatgccacgtgcagacagtccctcagctgtgggcttcccacgcaagcagccatgctggggataacttggctgaaacctgcgatttaatgaagagaagaatgactcctcctgcagccctgtgccccacaggctccctcctgcccccacccctcctgcagaggggcctcatgctggtgggtgggtccctgttgctgcaatgggcccaggcagtttctgggcagtggaggcttggctgtcttcctgcccaatgtcccctgtagcccacgctgtccgggaagggcggggaagcactcagccactggggacttcacaagatgggtatctgggagatgctgattggcaggccaggctcccgtggcccacaggcaggtcagaggtcacagtgctgagctgggctgagttggcagctcagggcagtgggggtgggggtaccttgctcagccatgggcctctctggcacaagggtttggagtttactgtaaacaactccttcagtttttccttctctcataggccaccagcagaattgaggggccctctgttgatgaggtgtggcctgggaggggctagttgtctgtccacctgatccttgcggacaggtgaccacaggcttcctgccccagggggctgggggaaagatcggggaggcctctctggcttccccacttggaaggaaaatacgggcataggggagacactttacagggacacatttcagccagtaccctctggctgtgctgggggcacagtgcctgccctgcccacaagaggggtcagttctctccaggatttaacttcagccttcagtgcagggcagatgagcactcagaggcccagaggactcatatcacgagagagaagctgtgaccacacaggcactgaaggttaagcagaagagtgggacacacgggtgacctgaaagtcccagggtcagtgtggttagccccagatagctggggagctttgggtaccaggcttagcaggggaggagggcccccgtgacagtttgctggggctgctgcaacaaagccccacgaactttgggggctgaagatggttctagaggccagaagtccaaaatcaaggtgtcgaccaggctgatcctttggggcctctgcgggaggctccggcccaggcctctctcccagcttctggtggctcccgggtgctcctgggcatgtagatgcgtcacgccactccctgctccgtcttcacatggccttttctctgtgtctctgtgtctcgtaaggatgcttgtcattgcatttagagcccaccctaaatccaggatactctcctcttgagatcctttattgcatctgcaaagaccctattccaactcctgtcacattcacaggtccgagggctagggctctggcatgtcttttgggggtcactattcagtccactgcggcagctgatcttaggggaagcagaatgttctaagcttggggtgagcggagggaacgctgctgggtggggagtgggagaccaggctcggagacaccgcggatctcctctgtctgatgagggcgtgatgaggttctcatctcaggtcctctgaatggcggctgcttctgaggagaccctttcccctggatctgcccctccagaaacctccacttaggtccaggtcccaaggtggatggtaagaggcggctgtccctgccacacttgatgggtgagtgtgtgaacggggctgggagcaggacacttgtcacttctgtggacagattccagaggctcatgaatctgctgctggggaaggtgcctgatctagcctgaccctccacccccacctcccccttcccgccccccttcaccagccctgttcccagagcttcacttccccaaaggcaggcgccgtttcctggacttctcagcagctaccccctaccccagacccctctcttgtaggcccctctggtctcagcgcctactcctccctgggcttctgcccctctaccgtgaggcttctgggcagaagtgtggggccccctcgctgtgtctggctctcgcggtataccaggggtcctcccaggggcccgccctgcccgctaggtttccagggagcttttcaagttcttagatgggcttgatggagtttcccaatgcgttgtctcagagcaggaggggccccggctgagtccgagagtcccctcagtcacaccctgggctgtttggggcagccaggcagcccgtcttctggaggtgctgcctctctctggttaccccttctggaatcttctgcgtccagttgcggcccctcctacacagcacacccaccacccccttttacctgtgactcttctttgtcaacctcttcatgtctttgagaatggagaccaggtcctcctcaccctggagttcagcagaacctaaaccaggcagatccgtgtaggttcacgtgggggctctgtggccactgtggctctgccgtcacctccagcccagcttggcgcgctttggatcatgtcattcagtgccggtcctccaaacctctcccctggctctgcaggtctgggaagcagctggctcctgggtgcagctgtgaccggagcctgaactctgctccctggggtcaccgtcccctgtaattaggctgcagctcatattggctcgggcagaggccatcggctgcccgccttggggccacaacacagagagccccgtgattaatggaggctccacctgggccaagtggcccctggtgttaggcgcttttttttttttttttttttttttgcattttttaagtgcttgtaacatttcccctaatggacaatgagacgaggagggagggaggggtggcttctctgcccaggcagatcaggaatggtcaccgcctgtgtgtgcagtgacaggtctgggaacagacaagggagagcttgtccgggaggctggaccctcacaccgatgctgcctgtgcctggcagctctgtcccgggcctcagaacagacactgaccaacacgctcctcagggtctccaggtccgggtcctggtccccggcagagcttcccatccatgggaagaagcaccgagcagccttgctggctcctcgcagggagctgggatgcatttctaagagcagcatgcgtgaagcccggggtctgggcaaaggagtgtttggggaagagtctgctgttgttggagggtcggaagtagaggggaaggaggggcacgcggtaggctgaggaggtggctggcgaccctgtggtggggacgagggggctatgagcagaccaggagccagcatcacgtttctctgtctccagaatcgaggacggagagctgccagagaggccctggcggggtgtctggggccacctaaagggcgtgggtggattaaagctgaggaaagcctcattttgggggactccgtacttaacctttgaggccctcagagctgcagcctgtggtttttcgaagtcaatcacctcccagggcctcgctcctgccttcagcgacagccatttatcagggagtctttgacccaaggagacctgaaaggtcatctggtccctctcctacccccaggcaggccacacctagaccctcccacacagatccgtcccacccttctgctgccttccaccagggacggagggtgggcggccctcccacccaggccctggcggccccaccccagccaggaaattcttcctctttatctgcctcacatctcttcccctgcggcttccgcccatttcccctcaatctgctcctagtggagcagccagcagctggtttagaacccgggggtggggggagcgctagaccagtgcagcacatctgagagtgtgccagaggtgctcccattcccatagctgatttagtaaagaaaagaggaagtccagcaacttagcgccactttaaagtccgcctggaatgaccctgtggctgccggaaccaggggcacgcggtagatgacgggagcaggcacagagaggccttcgtcccggatcagtcgctgttgccctcttggaggctgggctgcctttcaagaagaggacccaaggccctgtgagcggtggcctcctctggagcctttactgtggtcctggttctgctctgcgtaaagagagatggcttgaagcagaagctgctacgtggctgtcccaggcaggcgcccgtagtcccagctactcgggaggcggaggcaggagaatggcatgaacccgggaggcggagcttgcagtgagcagagatggcaccactgcaccgcagcctgggcgacagagcaagactccgtcttaaaaaaaaaaaaaaaaaaaaggagtagagaaatctttcccagaaggcctgcagtcacctccccttcatgtttcagaggtaaaaaaaaaaaaaactgcacatttcgctttttttttttttttttgagacggagtctcgctctgtcgcccaggctggagtgcagtggcgcgatctcggctcgctgcaagctccgcctcccgggttcacgccattctcctgcctcagcctcccgagtagctgggactacaggcgcccgccaccacgcccggctaattttttgtgtttttagtagagacggggtttcactgtgttagccaggatggtctcgatctcctgacctcgtgatctgcccgcctctgcctcccaaagtgctgggattacaggcgtgagccgccgcgcccggccacacgtttctgttcttgaacaggtggctccctgaccctgggtgtggttactccaagaccttgctctggtggggcacaattctggccccaggtagggcgaccgtataacttactgtcccttgggggacacgttagtgaaagggacccttgaatgactacggtgggacaacagatgtgagctgggtttgtcccaggaaggctggatgtatgggcctcttgagccagaggagacaacagcagaaagctctgcggctgatgggaccgagcaggagaagggccggcggaggctggggcaacaacgcacttgcccactgtgaagggcctgtgtgagctgatggctgatgagagggcagtggggcgaggctgcctcctgccaggctagaccagctccaggacacccatatctccttttcagaaccggtgactcagtggctagaaggggcttcagaattgacgggacactgagggagtcgaatggaatggctggagtggccacagcaggctctaggcctcctcccgtttcttttctgtgttctgttcctggggtctatatcctggggttgctgtaacagagtgccacaacctgggggcttacaaacatagcttccggcggctcctggagattcctggcgttccttggcctgcagacgcatcaccatcatctctgatctctggcccctgtctccacgtggctttctccccctgtctgtgtgtctttctccttttctgtcttttataaagatgctcaccattggatttagggcccactaaattcagaatgatctcaccttgagacccttaccttaattacatctgcaaagatccgttttccaaatgtgatcatgttcgcaggttccaggagttaggacttaagacatatcgttttgggggacactgttgaacccactacatttaataaacccagagttggtgccaatgtcccctgcggacaccatagcagattctggaggttccttgtaaaggaatccgtaggacttcttttcccttctggagggatgagactgtagctgggctggggaaagctgctggttcaagctggggctggttcagctggtgctggcttgccaggttgttagagagctttatccagggagaaattaacatcacaaagttgggggataagagaaggtttggaatcccaagggctggctgttgaggtcagctgcccacccctttgtgttccatcttacagggacccaggcctgccagtgctccgtttctggaaggaatgctgtgggctgctgtgccccataggcagggtggagggtccccttgcagccagcgagctgctcttcctgtagcgtgcagagggaaggaggaggcttgtttatttctcttggcctcagccgaaaatccaaccacaggctctggcactaggcagacctgctcattctcacatcatcattgcagagtgagccaggcctcttgggtggggctgtgatgagcaggaaggacctccggagtgcctgggacttcttgggcccagggttgccagaggcagagagaaagaagcctcctcctaacacttgagcaaagatagtcatcagaatccatcagagtggcctcctgtggctcttccctgggtgctgacccccctggtgcatttgaagttttcagggatactattgacgctccctgcacctccatccaggggttagtggaaatggttcttttcctccttgtccagaggtactgtggatgatgaccccaggtcccagacctcagtcattgggccacgtgtgcagataagcctgggcagtcagtaacctttggccaccaagctggcctcctgcggactgggccggcactggaggcgggtcttagctgctagcactgtggcccagccaggcctggccttgggaaggcagagggggaggggactgggaaagggattgagctgggggtggggtggtaccctggttcttccctcccagacctttggcaggtttgaactatctggctgcggctctctaaggagggagcgcctcctccgccttgatgtggactttgccttctgttcacgttgtccctgtccctaaacaaatgtggctctctgtggggagcctgggggccgccctccactgacactgctgtttcctggcttccctttgcaggctccgctcagcttcactgcgcctatttttaagcctttccttttggacggttttgcttcctgagaacacacccctccccatcaccccaactgtgtcctcctccctatccggagcctgctccacctgccccaggagccacctccctcctccaccaagcagcccaggccaattctggagggctaatttgtgtccctccagaagcaggtcctgagacagggatttcagtgggaggggacaccaggggatgcctgagtgtgggaatgggccaggcagggaatccagccaataaagggtgcctcaccagctcattgtgaccacaggtggctgcccagcccccataccgggcagcatggggagactgcagaccgtgcccccagccttgtcccacctggggttgggtaagggagctggggtttttatacttcagttcttggccaaggactgcactgctcactccttccagccttccgagggcttgggcactaggaaaggctctgggtggagacacggaaataggccatgtgaagtcagtgggcgtgattggtagcagtaaggccaggacagccttggtcaccagcaaggtgaccacacatttcagcatgcacagcccccacagacacacacccaggagatggtaattacaccagcaacagtcacccctgccgcgtgccatgcctgcacccagggaatcttattttttatttatttatttatttttatttgagatggagttgcgctcttgttgcccaggatagagtgcaatggcacaatctcggctcaccacaacctccgcctcctgggttcaagctattctgcctcagcctcccgagtagctgggattacaggcatgcaccaccacgcctgactatttttgtatttttagtagagatggggtttctccattttggtcaggctggtctcgaactcctgacctcaggtgatccacccacctcagcctcccaaagtgttaggattacaggcatgagccaccgcgcctggcctcaggggcaccttattaccccatcacctcctacagcaggtgacactgaggacactgaggctcagagtagactgtggttatgtcactctcctgtttggttctcctgctctcagccctgaaataaagagcacggtccctgtgcaggcccatacgtcctgtctccagccctggagcagtccttaagctccttgaaggcacaccaggcctttgggcctcgtcccccaagtcctggataaataggaggtgaaggagcctttgcaactggaccccactctgccagcgccaaggccctgcctgactacccaccccaccctacacagatcagggacctgtgccaaggtccagtgtcacaggagagtgaagacaaggaggtgcccatggcgtacatgctgctggactcactctgtagatcctaagggttatggggagttatctgccaggtgaggttttcccgtggctttttcctgcaggctcagggtagcatacagggaggtgcttccctactccttggcaccatctgtccggcttccctgagccctgaccctggctcctagatagccagtgtttcttcagggacagaacctgctttgctgctgctcagaggagacccagtttgaccagggctagcgttcctggaacctgagcctggaattccaccctgccctgggcagaggccacgttgctccctcctacgagagctgagctgcgcatgagattattctgaccttgggctctaccatttctttgcatgacatttgtcccaggctggagcagggctctgtggctcgcttggtgttccctccccagactgaggcctgatatgtacaccaggaagtgcttgatctggtttcaggagctgggagcggtttgccaggcagcctgtggtcagagcaggggccttaacaatggtcccttgtgcggcacattcctctctaaataggcccaggtccaggctgctcctgtttcgaccccgccatgggcctggaggggaaagtttgcatctggagggtggcccactgtggcctctttttgtgtagcagctgagaccgtaggtgcttgagaataggagaagccctgtgcccatcctgggctgtgagatgtttttccagaggtggggatggggatgggccagcatgcagttacccacaccctccagcttgttggcatcaaggtctgtgtatgtgtgtgtttttttttttttaattttgtttttccaacatggagtcttgccatttgcccaggctggtctcggactcctggctcaagcgatcctctagcctcaggttcccaaagtgctgggattataggtgtgagccaccatgcccagccagtaccaaggtgtgttttttaagagcaatattggccgggtgcagtggctcacgcctgtaatcgcagcactttgggaggccgaggcaggcggatcatgaggtcagcagattgagaccatcctggctaacacggtgaaatcgtgtctctactaaaaatacaaaaaaattagccagacgtggtggccgggcacctgtagtcccagctactcgggaggctgaggcaggagaatggcgtgaacctgggaggtggagcttgcggtgagccgagattgcgccactgcactccagtctgggcgacagagcgagactgtctcaaaaaaaaaaaaaaaaaagaacaatatcgatggttttattccctgaacatgctaagtgatccccatgtagtataagcatctcagaaggcaggaaaatgtaatgaacaacacccaccgccattcattccatccagagatcgttattttctgcccgggtgtgagtgtgtgtgtgcgtgcaaactgcacatgtgtgtatgaaatggaattaggatctttgtatacatcttgtgtcctgctatttttacttaatattctcggcatttctcatcttcaaaaatgtgattttaatgatggtgcaggcctttgacatatgggtttagaaaatctgcggaaacccggactgtttccaggttttgtcagtttaatgctgatgcaaatgtcctcgtacgtaaatctttctgtacttctgattatttccttgggataaattcccagaagtgggccaaagcacatgaacggtcttcaggcttttggagcaagttgagatcggtggggattggagaagggacccagggaggcttttgggagcttgcgagattggagtctggctttaggggacttgaattcacagatgaaggagatggctggcaaaggtgggaacctcctgctctatgggtgggggggtgacactgctttaccttccagtgacagcatggggatcctcccaacatgacctggctccgcatctttctgacactgtgcacggtccacagttgtgatgctcagctgggagcctcttctgtgtccttcagttgcattaactccttgcagacagaggaggaagctgtccggtgctcctccctgctgcgtgggtcctttgaatctgcccagttgggcctgtggatctgtgcagtcacgtacggggttctaaaatctgcaaaatgacaagctcacgaacactctcgcttctgtgggtgaatgtggataccccttggctgcgtctccctccacagggaagatggagacgtgtaaagtgacaaggacctgctacccctgggcaggttatgccggttccactgtgaggatggtggcagggggcttcccaggaggcctgcacattgggaagagaggggcgaccgtgtgtgactgcaggacccagggcgcagtcttaggactctgatgggggaggagatgctggggagccctgttctgccagcctggtgacagacatctcctaatgtttcccggctgggtacaactcacaatgtcctccgtggggaggcaattgcccatgaggcatccctggcagggatgatcttgtttcattgccacatatcccagcaatgaaacaagaatctagagtgatgtgattcctccgatgacttctccaaccatctggggtttttgtgcgactccaagaagggggaaggaggcagctctcgctcctctgggctcctgatgtggcagctctggaatggccacgtgtccgttggcccacagtgggccatttgtcgaatgtggttgtggtgggattggggctgggctggagagtgggtgaccacaccagctagcctcaccctgggccactgtgcagccaggggtttcatcttcccaggggtctcgttgtgagtgtcctggggctgctggaacaaattactggaaaccaagtggcccaacaaagattgattcgctcatggttctggaggccacaagtttgacatcaaggtattggcaggaccacactccctccgacagctcgaggggaggacccttccttgcctcctccagcttgcgttggcccaggcgctccttggctctggcagcatctgcagtctctgctctcatcacgtagccctccccaccgtgtctctttgtgtcccaagtccccttctgcctttctcctataaggacaccgagcactggatttagagcccatcccaaatccaggatagtctcatcccgggatccctaatcacatctgcaaagaccctttttccaaataaggtcacattcgtgggttcttggggttaggtattagacatgtctttttgggggtcactagtcaaccctctacagaacctcagacgaaagtgaatcttcacaggctgaaatgggggtgaaggtctagtgcgtccctcctccttgggagctccctcagggcttgtgcctatcctgtgatcctgtgatccagccttttttttgagatgaagtcttgctttgtcgcccaggctggagtactgtggcacgatctgggctcactgcaacctctgcctcccgaatttaagtgattcttctgcctcagccttccaagtagctgggattacaggcgcccacccccatgcctagctaattttttgtgtttttagtagagacagggttttaccatgttggccaggctggtttcgaactcctgacctcaggtgatccgcctgccttgggcctgccttggcctcccaaagtgctgggattacaggcatgagccaccacgcctggcatttagtaggttttggttgttttttttttttgagacagagtctcactctgtcatccaggctggagtgtagtggtgtgatcatggctcactgcagccttgatctcctggcctcaagtgatcctctcacctcagcctctcgagtagctgggattacaggcatatgccaccacccctggccaatttttgtattgtttagtggagtcggggctttgccatgttgcccaggtttgtcttgaactcctgggctcaagcgatctgtccaccttggcttcccaaagtgttggggttacaggcgtgagccaccacgcctggcttagtaggttttctagaagcgcctgaggcctggtgaaggcatggtgtcatggagtagagaacattcaactctgttcccggggagccggaacacacccctcgtagccaatctcaacagtcatgacgtggccaggatgacatggggagggggtggtgtggactgtgtgggaggccagctccccgggaagggggctggagtgggcttggctttgaggaggattcccaagaggaggaggaggcggtggcatgctcgtttggggggatggcgtgagccagggtgggcacctcttcatttaggtgtcaccttcttgacattccagccgggacatggtttccttggggaagatggacacccccagagtggggcatctcctggggaagatggacacctccggaatggggcgcctcctgttctcactgttcttctagcacacagttgtattctcttgcagttctggaggctgtgagatctcctggctgttatctagaacaaactcgcctttgagcagcgccgtcctgatggtggggtggcccctgcgggtggaacagcccctgctgtctcagagcttactgagagctagtgggcatgggagtggtgctggaccgaaacacccagagggatcatagagccaggcagtaagcacagaggccagctagtggggagggagggacccatccatgaaaagacaccaagcattgaaagagaggagaggatggttggggaccggcacacatgtgcattttgcgcagatggccaaggtggtgaggcgccagccacgcagacaactggaggaaggaggagtgccctaggggaggggccagctccggttctagaatgatccgcttgtgcacgtgggcctggctggaataaatcattgcatccgcaccgtagactcaatcgtaagctcacaccagggcagcctctgctttggtgcagtgtcttcgatcatgagttggccatggtgggggtgactccaaggggactcccaaggagggggttcaccggatctcccagggaaggtcatttgttttcttgggttggacctgggacaaggccttctcctgtctagtttctgttctccaacttgaccgcacggaaggatgctgaggacacctggaagccggcccctgctctacagcacccataggacagaggcacaccatgtggggacagtttggacagtgctcaggaggcagggagcagatcagaggaccgcgggaggccctgggaaccgcacgaggacccaggcattgagctctgcactttctggcatcagcccgatgtacagtctggctctgtgtctaccccgtacttcactttccccatctgtacgggggcggtaataatattctttacagcccaggtttaagcgggtgtagatgtgatgagcttggtaagcccatctcattacattcagttctgggcattgaaccctggactttctggctggtagaagtggacattcaacctttccttggggccctggggcttctgcagaatcagaacacagccagcagtttgcatgcagggtgcagagggacagagggacaccatgtcgggagcccacacctggcacacccctgactctggggctcagtgtcctgctgccctgcggccacgtgatcagctagaggtcatggctggacccataggcgaatacagcctgtggatttgattttgtttggccctgcggtgttttattttatttttagttttagtttgtggagacagagtctcgctctgtcagtcaggctgagtgcagtgacacgatctcagctctgcaacctctgcctcccgggttcaagcgattctcctgcctcagcctcctgagtagctgggactataggcgagtgtcaccatgcccagctaattttttatttttagtaaagatggggtttcaccacatcagccaggctgctcagtgttttaaaaagggcttgttttgctttgtgccagcatttaaagatcaggagatatcatataaagatccagatttctactctcttgagaagtgaacagctctggccacgccgggcccatatcctctagggcagtgacggagctgagacagggcctgtgacaactgagagttctctggagtccacacggctccttgcccagcttctggtggaggttgagcttagtgacccaggatttcgtctgtgtccaccaagaaggagaggtgcctgtggcttagagagggcgcccacaggagtgccttgcccaggaagctggcagctgaggcggccagggttagggggttgggcttcctcttcccctccccagtgcctgagtgcatttggaggaagagagacgggtgaggggaaggcactgaaattggtcctggagcgctattattgggggctggggaccagctgtcatcccttttcctgtgggcaggggaggcagtggtgggatcccatgagacccggactctgtggcctggtgaggcagggagcggctggggagacactgtgggtctccacaggggtgcgctgtgggtctggcctggggaaggagctggtgaatgtgcctgccatgtgggtccctccctgctctggccctgataaccaggagcggctggctctcatttggagtgcggttgtggggactgtggaggtggcagcttcccaggtaccatccccactgcctccgagggagcagaccctggtggagaggcaggatggctgcagggcgggagctggtggttggcatcactgcacgggcttgtagtagtggatgggaagatgcaggagaggctgatgactgagaaagttggttcctgtggactaagctgggggagccggacaaccaagtggttagaaccttgggctctggtatcagcctgatgtacagtctggctctgtgtctaccccgtgccccactttccccatctgtactgggggtactggtattctttacatcccagggttaagcggctgcagatgtgatgagctcggtaggcccggcgcctcgccggcactgaaagctccagtgtccgcccttagtgtcattgatggggttttgttcctgctgcggttctgattggttacagttgcggtcacttattattggaggcatgtcccccgctgtggctgatggtagaggtgtgtttgctggtggtgtcccagtgtgtgccttggctggaggtgaggagggataaaaacagccgcgacaagaaggaaatcaaggccgggcacggtggcgcacgcctgtaatcccagcactttgggaggccgaggcgggtggatcgcttgaggtcaggagtccgagaccagactgaccaacatggtgaaaccccatctctactaaaaatacaaaaattagccaggcatggtggcccgtgcctataatcccagctactggggaggctgaggtaggagaatcgcttgaacccgggaggtgccgctgcactccagccagggcaacagagcaagactccatctcaaaaaaaaaaagaaggaaataaaagtcttctctggaactagaacgttcctatgtagacgtagctggagggggaggctgtgtggtttgcgccgtggccatggcaagacacgacgggcagcatcttcccactccagcctgcatctctgccccagaactcatgatggttctcctaggatggggctgtcccttccgcttgctgagacatgaaggacgggaagagacccccggccctcaccgccgcatcgcctgccttcctctgctgctccttagcaggaaacatgccggagtgttccctagccatccattcaccaattgcatcccctctctttatttttcagccttgaaaagatcttttgaggtcgaggaggtcgagacacccaactccaccccaccccggagggtccagactcccctactccgagccactgtggccagctccacccagaaattccaggacctgggcgtgaagaactcagaaccctcggcccgccatgtggactccctaagccaacgctcccccaaggcgtccctgcggagggtggagctctcgggccccaaggcggccgagccggtgtcccggcgcactgagctgtccattgacatctcgtccaagcaggtggagaacgccggggccatcggcccgtcccggttcgggctcaagagggccgaggtgttgggccacaagacgccagaaccggcccctcggaggacggagatcaccatcgtcaaaccccaggagtcagcccaccggaggatggagccccctgcctccaaggtccccgaggtgcccactgcccctgccaccgacgcagcccccaagagggtggagatccagatgcccaagcctgctgaggcgcccaccgcccccagcccagcccagaccttggagaattcagagcctgcccctgtgtctcagctgcagagcaggctggagcccaagccccagccccctgtggctgaggctacaccccggagccaggagggtgagtcgcagagcgctaggtcttggatgctgtggtaatggggggcctggttgctggctttgccacagaatcttggaggaagaagctggatatggggtggagggtgctaccctggagacccagaaagaccggaatgcatgggggtgggggtctgcaagctcaggagaggtggctctctctgtctgatgggaacatgccaagatgccccaagcgggacttgaatgagagtttggaaagattttctgggtttcaaggagcctcctttatgggtcaccgtgggccttgctgggacctctgtctgctgtgtgtccctggagggcctgggaggcttagagaatgaggagccacgcaggaaccagggcaggctcatgcaggggtgtaggacagggtggagttgagacccctagaagggctgtcacattctggtggctcctgcttgaggaattgcaggctgcctggatatgcccagcagaggccgagggcttggggaagggaggagggacgtatgcctcctgaggcttgcattggagcccatggtctggtcctcctcccccaggagggatggttgtggcagagggaggggaacatgaggagcaccttagcctgcaggacaaaattctcagggcactgggaaggggtgcctggaccagggggctgtgtgatagctgcacacggttttatttgggggtgcccttctggcgagaggagagaggccatggggctccagcagcgtcctgggagggctcaagcccacagccgtgctgacatggagcttacaggcaggggattggtgccagtcctgtgggacacagggcctgtttggaaatgccaggctgtgggacatggttgggtcccttctcagaagcgtgccccctggccccagcagggatcgtggctccatggggctatagtaaggtgccagctgggttagaagcccctcaagagccaggtctgattctgggcacaggatcagaactcagtaatgctcagtaagccttctttaggttggacaaacagcacagtctgggtttttgatttagctgctgcttcttatttctaaccgtggtgaaatacacaacatacaatgtgcaattttagccactttgcagtgtacgtttcagcggcattcagtacattcacggtgttgcgcagctgccaccgctgtccatctccggtacccttttcatcctcccaaactgagctccgtccccgttagaccaagctccccatgcccctcccccagctgctggcagccaccattctattttctgtctttattatgaatttatttgaccactctaggaaccttgtgtgtgtggaaaaatacaataactgcccattttgtgtctggctcatttcactcagcatgacgtcctaaaggttcatccgtcgtgctgtagcatggggcagaatttccttcctttcagaggctgaataatattctgttgtgcgatgcacttgtgttgtgtagctgttcctccatcggtggacccttgggttgcttccacatctctctaagtccctctttccatcttctttgacttttctttgacttttttgagacagggtcttgctctgtcctccaggctggcgtgcagtggtgtgatcactgcttactgcaacctctgccccctgggctcaagtgattccccagcctcagcctcccaagtacctaggaccacaggttgcgcgccaccatgcctggctaatttttaaattttttttgtagagacaggttctcactaggttgcccaggctggtctcaaactcctgggttcaaatgagcctcctgcctcggcctcccaaagtgttgggattataggcatgagccacccaacccctttttggtttttctttttgaatgagagttctccagtggtcagtgggcttgggggctgggaggatgtggggcctggagagggtgtgggtttggggggagaccagtgctcctcatgctttcatgggcatgtggagtgcacatttgtcttggcgggtctggggcctgggactctgcatttcctacagagggggcatcggaacacactgagtagccagaggctagtgggccttggaaggtcctttccggccctcagtgtgcgagtcccgtgttccctctcccatctctctaagcttgactctgaagagccaccctgccccagccacccagactcagtgacagtggttgctggtggcatggtgtcaggccaaaggcatgggcagtttgcagagtggcaggaggctgtttcctcccctgccttctgttggtgcaggacctttgtttgacgtgccggatacacccccatcctgggttgatgtgttcacactcagctgagtcaaacaggatgtggctggggaggcggttgtcaccgagccatctaaatctcggtgatggctggtgctggatgcacagggacgtggtcctggctctgggggacaggtagggggatgtccatggggatgtacaagaacattctcctccaggggcagacacagtttagcccctaaattgtgccagagactgtgccgggagccaggcccagggacacaacctgcgggctctgctttctggagctcaccgagccgtgagcaggatggctgggacacaaggagtgtccagggagcttccccagcagtggaagtacaatttcatcaggccaggaaggggagagaaaggcaggccacgtggaggcagcagcgttcagagctgccaggaacctggcgctctggggggacggtggctttctccatggaataggatgtacacgttggagccggggcatgggagaaaaccatcagcatcccagacccggccacccacggacagggacctgtgcaggtgggagtccagctcacgtggagaggtccgtgggctgggctgacagtcctgagggcctaagcaagtccaggtggaggaaatgcagggacagacgagggcagggccttcccaatggaggagtgctcttgaaatccgatgggagtggcttctcggggggcccaggcctgagccccactagttcttcctccgaggcaccacctgcttgcttctccgtcctccctctctgtgtcacgaccgttctggacacggatccagttctctccaactcagcttcctgcccatctttccttcaggcccatccccttctgcccctccatgtggggctgggctgggagttccctgagccccgacatgcacagctctgaccaatctctgcggcccctctgtcccccgagcaccagggatccagctggcaccatggggaaaggaatcatggagggagttccgtgccctctgagcagacgcccagccccttggcttctgcctgcgggagggcatctgtgctgtggtttgtctccaccccagagctgtgggtgcagggcagggtctcctggggccccagctgaattgctcccagactgacttccccaaagcacagcactgctgagatctcttcccgtgctgagccttctctgctcactcaccataggcccctccacggttgattcactctcctgctcagctcacacctctctccttcccagcttctcctgctttggtcttcccttggtctctcacacctttcctcacaacccctttgccctgacctcctgaaccctgacctctgcttctctttacatcactgccttggtgaactcctatgcatccctcaaaacctggtccaaatacctcgtgtttggcttgggatataaatgatttgtgtataaactttctttcctctgctagacttttttttttaaatgtgaaagtagtttttcagatcataaaaagtaatcgagtaccctttctttaaaatgcaggaagtacagaaatgagaaagaacctaaaattcacctgtaagccagcgatatccatgcttgaggttttgctgtatagtcttcaaaattcctttcatgcccccactagattctgagggtagggctgttgtctttgtttttttttgtgttttttttttgttttttgttttttgagatggagtctctctctatcacccaggctggagtgcagtggcatgatctcagcttactgcaacctctgcctcccaggttcaagcgattcttctgcctcagcctcccgagtagctgggactataggcgtgggctaccacgcctggctaacttttgtatttttagtagagacggggtttcaccatataggccaggctggtctcgaactcctgacctcgtgacccacccacctcagcttccctgacctcccaaagtgctgggatcatgccaccgtgcccagcctgtcttggtttttataaagaatcccataaggggccaggtgcagtggctcatgcctgtaaatccagcactttggaggccgaagcaggcagattgcttgagcccaggagtttgggactagcctgggcaacatagagaaaccctatctttacaaaaaatacaaaaaattagccaggcatgatagcatgcgcttgtagtcccagctactggggaggttgaggtgggaggaccacctaagcatgggaggttgaggctgcggtgagctgagattgtgccactgcactccagcctaggagacagagtgagaccctgtctcaaaaaaaaaaaaaaaaaaaaaaaaaatcccataagataccaagtaagtgacttggacataataggtgtgccatgaaattatgctgaaggagtgagccactggtggtgagttgggatggcttttttgtggttcttgtaggcagatgtagtgacccccatgggtcgtccctagagaccaagcagaaactttcctggtcaactttacccccaggacacctggtctctcctctggaggttgtgctggagggctcagtgggtgggtgttggcttcagtgtgggggttctggaaggagtcagcatttcaggagggagtgtgggcacctagatggttgaaggggagggagaggaagagaggcgctgcagagggcagaggcatccctgcctgctcctccgccccagggcctggtgaggtctgagctttatgctggtggggtggattctcggtttccgaggctctggccctgcccctggacttggcaccctccttgctgtcctcccacagaagggcgctcatcctttggggtcatccctggtcctctcaggctctgggtggggacggccttgcctcctctcctggatccctgctcttttcctgccccccaacatgggtgcctctgggtggagtggggtggggctgggctgcagcacccagtactgagcctgcaagggctggctgctggctcagagccccccccaccagagttacccccctccggctcctcagccacaccagccaagtttctccagagctgccttataaggcgggtgctcagcgctcgttcatgggtctggttctctgccttcttgggatgctcactgggggcaagagggaggccaggcccagtgcccagctcagttctgggcatgtcccagctctgccccatgagtcaactggttctgaactatcattccacccctcccagcctcaatttcttgatctgtcaaagaggcatctgcagaggtggctgggggctgagctctcatgtatccacccaccccaagaaccaagaagggagtccacagtggttctggggccacttgtgaacatggatgtgaaattggggcggggtagacatggcagcatgtctcagtagttttcctgtgacccagagggtctggaaatctttgtcatgtgggtggagcgttgagggagcagggggtcaggcccccccgagctgatgatggtgggcgtggctcttcgcatacttggtccgcaccgggccgtgtgttccaggggcagaacagggaggaatctcagcacagacagcagggctgccagtacagcgttgagtatagggttaatcaaagcacagggctccctggaaccacccaacacagagcagtgaagaggtggctttggggaaagtggggtcagagctgagcctgagtggggggtggggagggcgggcatcagcctgcaagggagggacacctactgggccccagaagttcctggtggggatcagggactgtgaagttggggagagggtgaccactgtgatttagggaggaagggccccatagacagcccagcttctggccccgtgtttacaggacaccccacataggctctgagcctatccctggactgtggactccctgaggcagggtgtgcaggttcgtccagtaccaggtgtaaggcagggggccttggtaagcgtcgagggactcactggtgtctgatgaagcagtgagtttggatcgtgtcatgcctcgggtcctgagcctgcaggatttttctgtggggctgtgtgcttctgcttctggaggtgtccagaaggcactgacgttcctgccgggatgccttactcggaaggtcccgctgctcccacctcctcccattttcctgagctgcttgcagagggcacccaggtccccttttactttgggattgggtctctttctctttccccttctaagaacaagtaccctccttctccgaactgtccctggagcctctcagacctaggtctagagtgggaagtcccgcatgtgctgggggaacaggaatcaatgcgggaggattggccaggcccggtgtgtctccttcgtggtgggacggggtggggccagagaacagagcctggctccagagcccaggaagagaacccctcccctcgccggcctgccaagcaccgtgcagtggtgagaggaaaggagggctggtccgggaatgcagcgggtgccgagcagctgtggaataccttaaatagagcgcagctgcggggaagggtggggccaggaggcaggcgctgggggcggtttctctgctccgccccctgcagctctgtggccctgaccacccagcctggccccaggatggagccccggcccccagacacatggcactgggtgaggccgcctctcagcacttgtcccaggaagtcagagcagctgccagaagagagaggagctgtgtctgtacccgccgcctcccaggcccgggacagctgccgggattgagggtctgcacaatggcgagcctgtccggaggggcgcgccgcggccagacagccatgctctgtgcggtgtggacagagggcacattcagccctggaggagcgcactcagactccccgcctcggggcccaaagtgtgggcagcccctaaccagaccctggattccagcagacagcctgggaggatgccatgtggtccaccctgacacactgtctcacctgtgacctcatttctgagagctgcagggaggcgcttcctcagttggactccacttcctctccggggttttctgtgggtgttataagtgactctgtctccttcagtccaaggggggctcctggggtatgggctgtaactgacaggctagagtagcccatggccagggctgagcttccttcccgttctctctgaacactgggcccaggaaggggttaaagtggagatgctctgattaaagttgagggaggcatggagctcccctgaccctgtccccccatcccactgctgctactgggtgtactctgtggagccccaggactcttaaagaacccagagtggagattcccggtctcatccagtgcaggtgagggggaaagtgatttgtccacagttacatggctaccatcagcacacctgggtcaagctcgattccactccacggcccctgtctgaaacctggaactggaaatggccctggaaatcactgattccatctgccgccttccaaaatggcccgcagaggttaagatatagactcctgtaatgccttgcccactcgtgtgtggggaaatggcagaggagcaccggctttgccctcacactgcctgggctgccgcccctgccctgcctagtggctttcctctctggtccgttttctcattgtggaagtgggcacaattcttcctgtgcagcgtggttagagtggacagtgatgattcgtgaagcagggtggagcgcctgggggattcgtgttaaacaagcacataaacaaaagccaacacaacccttacttaatcagcaagcaggccttgtctgaagcccctgggcagcacctcatgccatccctaggttccaggccggtggtgtcgccccgtgtctctctcacccgcaagctggtgtttagaagccctgctctgtgttctggctcccattctccctgtgacctttccctttcttcatcctaaaaagcaatgcacgacggggcgtggtggcgggcacctgtagtcccagctgcttgggaggctgaggcaggagaatcacttgaacccaggaggcggaggttgcagtgagctgagattgtgccagtgcagtccagcctgggcaacagaacaagactcccatctgggaaaaaaaaaaaaaagcgatgcccagtcattcttagatagaaaatgaagatcacatgaaatttggaaagaagtttttctctcccattccccaactctctcccaaggggtggccatgttgacagctgggtgtggcattctcctgaattttattcctgcagagtcattcagggcttgtgtaaaaaaagtcaatgtgtaaatatagacttttcaagaacacaaaggaaatcagacttctgctaccagcttttattttttccatttaacaacactgttgccacttgtagatgtagcacgttcctttttctttttctttttttttttttttgacagagcgtggcccaggctggagtgcagtggtgcgatctcagctcactgtggctcactgtaacctccacctttcgccttccgctttcaagcgattctcctgcctcagcctcccaagtagctgaaatcacaggtgcttgccaccacacctggctaatttttgtatttttagtagagacggggtttcaccatgttggccaggctgctcttgaactcctgaccttgagatccgcccacctcggcctcccaaagtagcacgttccttttaatggttgtgtcatcagctgtcccatggccctgccaggcttgtccagcttcccactgtgattgagaggctgcaacagatgttctcgcacttgtacatgtgcacacatgactgaaggatgagctcttagtgaatttctgtgtcaaggatgtgtgcatttaagttttgatctgctgggcacagtggctcacacctgtaatcccagcactttgggaggccaaggcgggctgatcacttgaggtcaggagttcaagaccagcctggccaacatggtgaaaccccatctctactaaaaatacaaaaattagctgggcatggtggcttgtgcctgtagtcccagttactcaggaggctaaggcaggagacttgcttgaacccagcaggcagaggttgcagtgagccaagatcgtgccattgcactccagcctgggtgacagagcgagactccctatcaaaaaaaaaaaaaaaaaaaaaaaattgatccttgttcctgaattggcctctaaagtggttactagaattttttaggacccctcccctcgtcgacctgctcagctgtctgctgggccctgtgcagtgatggtccagcagggaggtcctatgccccttacccctggctgagggccaaatgctctccaattggtgttttattttgtgcatctcggtcaagcgagagggattatctcttcgtatgttataggccagggccctgtgttctcttttcatttggaaggtgtatccttttcttgttgaaattttttaaaaagagttctttgtaagccaggcgtgatggctaacacctataatcccagcactttgggaggctgaagtgggcggattgcttgagcttaggagttcgagaccagcctaggcaacatggcaaaaccgcatctctgcaaaaattagctgggtgaggtggtgcgcctgtagtcccggctactcgggaggctgatgtgggaggatcatttgagtctgggagtttgaggctgctgtgagctgtggtcataccactgcactccagcctgggtgacagagtgagatcctgtctaaaaaaaaaaaagagttatttgtacatctttatcacagcaggtacgagtatcttgtccccagctgcctacttttgattttgtttctgggatgttcttctacacagaacattttaatcctgatattgtcaagtctctgctttcccttttagcttttggaattcacatcctgtttagaggtctcctgcgttctgaaattataggaaagaatttcacccacgttttcttctagtacttctgtggtttcatttttacatgttgaaatcatgaatccattggaatgtattttggtttcagcagcgaggtaggggtagatggtattgcttggatacacagcagcgagcttggtctggagcgggtggggcgtgtgtgtgtgtgtgtgtgtgtgtgtgtgtgtgtgctatttttatcagttttggtgtctgcattgtgctggcttagcaaaaacaatttggatgcatttcttttaccctctgccttctggaacattttaagcagcaacataataatctctctgttaaaacttttcaagaattcactcgtgaaaccatctgagcctgatacttttgggggagtctagcactttaaaaacttaaactttttccatgggtctgtgagtttgggagtttttctttcttcttaaaattcattactatttttttcctagaaaagtgtcttttagcttatttaaaatccgtcagcttattccgagggggttgctttagctcgcttagtgaggacagtgtgcagcgcggtgattgacatgattgatcagcagagcacgatcgatcagtcggtgtgcaaacatgactgactgtggccagcgtcctgggatgctccatgttgaggcacatgtgtgcagtgcagggtgatgtgtattctgagaggggatgaagccacaggacccctgcacccttaggagagagcccccctccccaaggctgcagtcttgagtaggtagtgacgggactgggtctagggggctgagtggtcccagcaggccaagggcttcaggaattatgagaagtttggagttgcccagagagcagctttcaaaaccagtctggactgcagcctccagaaagacatgcgattgacaccacgaaccaggacacacctatatatggggtgggggtggggatgggatgtattaatgaaaccaaatttccgtgatggaattcttacctttaccatgcgtgtgctacactcagtattttctttttttttttttttttcccctctctctttttttctttttgtttgtttgttttggagagagggaaggctttttttcatttttttttaaacagctttattgagatccaagtaagctactatacaatccaccaatttatttatttatttatttttttgagacggagtttcactcttgtcgcctaggctggagtgcagtggcgccatctcggctgactgcaacctccgcctcctgggttcaaccaattctcctgcctcagcctcccgagtagctgagattacagacatgtaccactacgcccggctaattttgtatttttagtagagacggggtttctccatgttgaggctggtctcgaactcctgacctcaggtgatccacccgcctcagcctcccaaagtgctgggattacaggcatgagtcaccgcgtggcccaatccacccatttaaagtgcataattccatggttttcagtctattcagagagtagtgcaaccatcgtcaccacaaccaattttagaaaattgaaaatttgagaaatttagaaaatttttttcttaagaagaaaccccgtagcctttagctatcaatcctgccctcctcctccatatttccttcctatctgtgtggattctttttttttttttttttttttttgagatagggtctcactctgtcacccaggctggggtgcaatggctcaatctctgctcactgcaacctccacctcccaggctcaagccatcctcccaccatggcctcccgagtagctgagactacaggcctgtgccaccatgcccggctaatttttgtattttttgtagagatggggtttcaccatgttgcccaggctggtcttgaactcctgggctcaaatgatcctcctgccttggcctcccaaagttctggaattacaggcgtgagctactgcgcctggccgattctagacatttcttgtacagagaattgcacgtttggcctttgtgtctggcttctccacttggtgtcatgtttccaaggtccatccacattgtggcaggtgccagtgcgtccctgagtaatattccaccatggcatggaccattccattgtggacagacatgttgccttcatcagctgagggacattgggttgctgccaccgctggtgagtgtattcttttcaaattaaaaaaaaaatgctggtcaccacccactagatcgttttcttggcccacagggtgggacaagccggcctgggtgagggccaggaggtggccaggtggaggcggctggagcggccctgggttgcctctgggcgcagcaggcagaggtgcaatggcagagtctgagcaggttccctgggcggatctccatgccggtaatgtttgtttattcaagaagtctcggccaggcgtggtgcctcacacctgtaatcccagcactttgggaagttgaggcaggcagatcacctgaggtcaggagttcgagaccagcctggccaacatggcaaaaccccgtctctactaaaaatataaaaattagctgggtgtggtggcgtgtacctgtagtcccagctactcggtaggctgaggcaggagaatctgcttgattccaggaggcagagcttgaacctaggaggtggaggttgcagtgagccaaaattgcgccactgcactccagcctgggtgacagagtgagactatgtctcaaaaaaaaaaaaaaaaagaaaaaaaaagaaatctccagtgctgccctgtgcccggcaccgaagccgagggaaggcagcattagtatgagctcccagcccaccgggctcctgtctggagctgacgtgcgaccaaggcacacgagggaagcatggcgaggtggacggtgcggaggcataaggagcaaaataaggcagatgcagtggctcagtggctcctggtggctgcgaggagcgtgggcaggacagccccaggagggcacctggagagcagggccggctggggcaaggtgtgtcaggcacttgtcaggagcaaaatgtaaggggacaccaaagagctcaggaatcaacacagatagtatttaatgcagtatttttcaatatcgaaatgatgcatagtaatctctatgatgaacaaatgttggaattttaaattaagacaggcccagccctgcacgtgcacagccctgtcagagtttgttcagcgtggaatttgatttgtttaaaatgttgcttcaaaatattgtttgattcctggattttttggcactgccttaacttttgcacctggacgaaggcctcaccctaatcccagctggagagggtcaagggctggtgaatttggctttggacctgcagagcttgtggtacctgagaggtggggccaggaacaggaaggagctggtgagaacggcacccggtatgggatggggccagatcagagcagcactgtggctctttccaacccgtggttttgctgctggatgcttggcgttggtgctgagcccccggccctctgaacggagtgtgatgaataacggggccggggagctcttgggcccctccctgaagcagcagtgaagccagggacatgccggcagcaggcagggagagggacgtctggtctgtgcctggagccagctgccccatggaggagctgggtgaggatgcggtgggaggaagaccttcccagtcctgcatcctccgaagcataactgagtgcttgtgtggcttgggggtcactctggtccgaggacagtcttgctttgcttagccaggctttgaagagccaccgggatacggacagcagccctgctgggtggcaggttgtccaccctcgcccactcaacgctggaactggatgcagagcacctggatggccagtcccagagtgtctctgacactcccagtcacctcatcccttagaccaggataagatgcgggatcccaacctcgagcctcccatgggctccattccatgtgctcccataagccactgggcccacctcctggctccagggctgtctggccatttggcatcttggtttcctcatctgtacaatgaaaataatagtcccagccttctcgaggagttacaagatgcctttcgtgtgaaaaactgggatttggtaccagactatctggatttgaattttggccctacccctcctaacctgtggctttgggccaatctggcctccctgtcctcagtttccccatttatagagccatctcattgagttgctgggaggatgaacataaggaagtgtactcatgtgcccagagcattgtgattttacttattattaccaaacgaggcacacaataagtgcctaatagatgctcagtgtcatttcacggattctgtgtgccttgtgtgtctccagcagccaagctctggaggtggggaagctgttgacgagttgcacgaggtaattagaaagaggaggccacaggtgcaagggtttgggtgacacctgtggacagagagaggccgatggaccctggcagaggggaagggggcccttgcacatagaaaatgtttcctgcatccaagatccttgtgactctggaacagaggcagcagaggtctgcaaattccaaatcataaacccagaaagcatagaacattcgtagagaggaccagaaacatcatatatcttagtgtgtatagaattttccacatagccaaacaaaagcacgtttctaactgaagctgttggagagttcctgaggactttataccagacaagggccggtaagtggaagttcaatacgcaggagccattccttttgttcacaaatgtttgccgtcttttctgtctatatccgcattcatgtgagggcactcataggtccaccgtccagccccatgctttgtttgctaccaaaaaatttcttaagaattcctcagctgcaaatcctcctaccggagggggggttccaggaacccagccttgctcggggttggggcacctcagcacctgctgcacaggcgttggtcattaaaggtcatgtgccgtatccgtgggccctcggggtctggtggcacctgggcacacagtccagtggcggcctcctacctgccagacactgggagtggggggctcctcattcctgttccctggcggtggggggagtgccccgagctgtcacacatcagaacccaccgactcacacgttgcggcaccttacagccccttgacagcctctcagcctgagagaccatcaaactgagttcctggagagggtggctgttgaggcctggacacaggtgtggacaggatagccctgcctcatctcggagtcccgctccggttcagcctcttgtgggtctgaagctcaggctgggccagtccctgcccctcagatggccggaaaggcagcccagccccacggcctccttgtcaggctctgagagccgcctggcctccagctctgctctttttttttcttaagatggagttttactctgttgcccaggctggagtgcagtggtgccatcttggctcactgcaatctccacctcctgggttcaagcaattctcctgcctcagcctcctgagtagctgggactacaggcgcgtgtcaccatggcaggctagtttttgtatttttagcagggaccggttttcaccatgttggccaggctggtcttgaactcctgacctcaagtgatctgcccacctcggcttcccaaagtgctgggattacaggtgtgagccgccacgcccagcctccagctctgccttgattttctcttaaggccgtgaggatgtccacgcctcctcctttcctcacggcccattgatgtctccagatgctctgcaaagccaccctcccctcgggagctccccagctggtgacgggggaccttttggggatcactgcccaggtagtcatgtaggtctgtgggccgtgcttccaggctggaccgagacccggtgcatggggtgcttctggtctgagctgaggcccctggaagccacagccaggaggcagcaagggacggctgtcatgtcccctctcccctgtctcccagggtccctgcgggacagatttccctgcctgagcctcctggttgcccataccctggcctcccaaagcccagcctgaagccttaggcaccctacaacctgcttcctctagcagcctgccctgtctcttctctgccgatgttcctgaaactttcctgcctctccttacctcttggccagagagagactggagaccctgtgggaacccccgaggggagggagaaggccgctgtttgaacggaggtggtctttccctctgcccctccccaggcgggtcacacttgcaggcccagcctcctgctgtggcagcgcttggggtgtcggctgcctcctgggcacgagttgggagctgagggaggcgctttcaggaccggagtggcaacccagctggaggaggagtaacaggcccgtggtcagcagcagccgccgcagggaccccggcgctgtacctgtgccccagctgacccctcccgcttccctagggtgggccggggatggtggtctgttgcccagcccaggaagaagaggggccgtaatcagcagcagccacctcaggggaccccagcgctgtacctgcgacccagctgacccctcccccttccccagggctggctgggaatggtggtctgttgcccagcctaggaggaagaggggctgtggcttccactctagaggtctctctcccggtccctcccccggtgctggtctaactgcaggcctgccttaggccgtgccggcacctgctgactgacgcttagcggatgctgataggagagggctgggatggggaagcagcaagtcccggtcactgtgggctcgggttacagatggttgaggcacctcctggccatccccaggaagcaaggccccacgcagcctccgactcacccactgcccgtgtgtatttcaggaggctgcatcccccaaggcccccaccaggtaacttcattgggctgggtgtcgctgcaaaaccacccattgggtgcggtggtcttctggtggggggcatggctggggaggatgcggtggaggagaagccagctccgtggttggggggagggcggactatccgtttcctgtctgtcccctgaactggagctcatggtccctcccccaggtgcctgggccatggaagaggtcacagccctgccttattcctgtggcagcctaggggagccctggccagtcccgtgtctcctgggagggcgacagcctggtcaggctgcagggcaggactggaatgcagacccctgcttggccatgctgttgcctggctgctctgtctggggaccttctgttcaggaagagagaagcgggccggacagcccggctcagtgattggaagctcagctccccatgttcagtccagcaggaagtttgcctcctcggaacacttgcgtgcttctgcatgtgtcttcttggctggtggttctgcgaggcccctactgggctgcgtcatgtcctctggccaccctggccttggtgcctggcccctgtgaaacagagatacctgggcagtcccccacttgtgcttgcaagcctgtgtggcttcagtgatggctgattctgctccacccagaggacctgggaatcctcagcccaactgtccagaggagtctttctcagtggggagagcctgagctgtcctcctggtggacagtcctttagatctcaggcggacttccctgccggccgttcctcctgctgcccctgctcctctgtcccccatctgtctcccaccctctcccctgcagcagccagctggcacggggacctccccttccctctgggattgtgaatgagacgactttcctggtccttctgggtctagatctttctggcaacagtcagtgaaacccttgtctcaggtgggaggagaaggctcagtatgtggtcacaacaacggtcctaaccacatcactctcaaacgctggctttcacttaccccttgccctgcccaacagttactttcatcatcccattttccagattaggaaatcaaggcgcagagagcttcagccacttgcctgaggcccccacagttaagtgtctggatttgaaccctggagcagcctggctgctgagctgtcctggagacggggtactgtgcagtggtcggggtaggggtggagctctgccgtcgctgactcccgggctacctggagtgataacacagcccagtgtctgggcccctgcctgagactttggctggatgccaggagcccgagaccttccagctctttcctgtgtaaggcgccatggggtgaaatgaaagaaaaccccagttagaaggtgtccccctcttccttcagtccctcagctgccctggattttgaaataagacaccgcccgtctgtggggtgagcaggaacagattggaaccgcatttctctccccccagtcacagctgccaggagctcatctttctctgtctcctccccctgccgcctctccccacaagactgggctggatgctgctgggaaagtcaacaggaagtcttttggctgcggtggaggtgggggtctgtgcttccctggggaccgagatgagggctccaggttggctccggcaagagcagggaggctcacgtctctgcctgctggttttgcttcctgtcctgggagaaggtatccacatgtcccagaatgcaccctctgcgtgtacagggatggcttttgggccattcacctgaggtttattgatctttctctttggaactggagtggctcctccacggtggattgggctgagctctctgcctcggccgacgtctttccccaggcacttcctctcaccgtgccagggtgcaggttgctagtggatgggtcttcaccctcggggattggcagctgccacgctcatttcacagtcgagacaccctggccgaaggttctgctaagctccatggagtgtagggattttttttgagacggtctctctctgtcgcccaggctggagttcaatggcccaatgtcccgctcactgtgatctcgacctcctaggctcagcagtcctcccatctcagcctaccaagtagctgggactacaggtgtgtgccaccatgcctggttaattttttaattttaatttttttttgtagaaatggagtcttactatatttcccaggctgaactccaactcctgggcttaaatgatcctcctgccttggcctgccaaagtgctgggattccaggcatgagccattgtgctcagctggggttttcctttaacccttcctggcccttcccaggtgcaggacccgggcctcagccttatgtgttcttgaacagctctgggctctgtcctgtacctcctgggcgcgtggtcaggcctctcgtgacatcagcaggagactcaggtgaagaagcaggcagaacggaatgcttgctcacccagcctcggggccaggcggggcggccaggacagtagcagtggctggtgtggcttcctgggaggtcagcccattggcgtggccagcgaatggggaggggagcttctccccttgtctcccctcatttctggtctctgggcctccagggccaggtctccagagttctaggtggaggatggaggtcagggaagctggggtaagagcgggctgggggtgggtggtcaggcggatcctggaaaaccatcctctgcaggtcccgctttccccagggagcactcagggctggtcccggggagccgggctaatggtcacctcggatggtgcaggggtccatccccatgaaaccgggcccatccccatgaaactgggcccacagaagcttttggttccggttctgttctgccccctggctcttgcttccaaagtaggactcaggatagctctgaattccctgccgaaatgcagcttcctgggccctaacccagccctccagaaccagagtctctggggtgggccctctgcttgtctagcagcctccaggggacacttgtgcctgccagagcaagtctaataagcactgctgtaaacccctcgtccccacagccttctggttcgtctcccttttcctgctgggatctgcatcaggattaaatgccaacatcagggatcaggttatacttgtgaaccctgagacaatacctgcatctttttttttcttgaggctgtcttgctcgctctgtcatccaggctgaagtacaatggtgtgatatccactcatggcaacctccacctccagggttcaagcaattctcctgtctcagcctcctgagtagctgggactacaggctcacaccaccacacctggctaatttttgtatttttagtagagatggagtttcaccatgttggccaggctggtctcgaactcctggcctcaagcgatccgcccgcctcagcctcccaaagtgctgggactacaggcgtgagccactgcgcccggcctgatacctatatcttgaccaagctgctgtggaaacattgagttccccttgatagttttgtccacagagtgaatgtttaggaaccggcgaggcatctctcacccccacccagatggcggcctggaggcagcgtttctgaccctgtgatgggatttgtctctcttgtccaagagactttagagatgtggcccctgaatgtgggggcccctgttggggtgggaacgggagctggccctggccattgtccagtgaccccatctcagtgcctcgatcctagcaccctcgatctcagcgcctccccttccccggctccgcgcggagatcacgtggcttgcgctgagcaatcctccactgcccccgtcgcgttcctgctgcagggaagcctttccagggagccagctgacacatttggcctccattatttgtttttgaacaggaatgaaaggagagagtgagtaagaaagtggcaggaggtgggggttgcagagtaggggaaggtcagagagaggggaggaaagatctggaaagtccaggcatgtgctctggaagcaggtgccagcgatgagctcatctggagggtggccgcccgccctgagccctgcctggggccagcagggaacactctgccagggcatgtcgctgggagcctgtccttggctcactttctgctgctttgagcgctgagcagatttgtttccattttagggacaacgcaaggaggctgtcattccacccctcaccttattaatatttcatgaatcataagtgaccacttactgcgtcctgacgtactccaggcgctgggctcgaagctttatgcgcttcatgggatgtatctgcactatcgccgtagaaaacggttcctgttactactgcagagaaggcaccgaggcacagagaggttgaggaactggcctcaggccacacagctagaagcggctgaccctggctgtgaacacagggctgcttgactccaaagcctgagctggtttgcagcgaggctcatggtttctgtgccactgtttgagcctctggtcgagccccttggctcagtggggggcccagtgacctaccagctgttccattatatgttgtggacacctccacggcccacctgggtgggagggaaggggcttcaggaggtgggaggggtacagggaacacagtccagcctgcttgggcccaataccttgaccttcaaggtaccccttgagggtagcatgaggctaagctcttgttctcctccaggactctgttcctgtgagggcctcggggtcccttgcttttttctgggggccttgctggtcaggatcacagagaagctctttgctgttgatctttctgcctctgtatcttttggcaagccattttatgactcagttgctttgtctgtaaaatgggttgaataacattgtcctgcctcggagggtttttgggaggatcaaatgagacctgttgcacagaagccctttgtaagccatgctgactggcggtcgccgggcccccaagtgaatgggcatccgggcactgagtgtgtggactcagtactcggaaggaggggctggggggtacctagaactcctgggaggcttggacccctgctctgctcagattctgagcttctccttggccagtttaattcccatcagtagggtgagggtaaccaggacttacgcatagttgggcgaagtcgagtgaccacatgtggaagtctagcgtccttcatgcaaagtgggcaggcggccaaagtgagctctgctccagtccccccacccccggggctgttcctggcgccctgccctcccccagagccccactgacctgcaccatgtgacccgggcctgggaagatgggcccagctgtgggaggtcgtgcgggctggggactgagagtgccggaggagggcctcccaggaaaacccagctgcacaggaagccgggccagcggcctccggaagcctctgggctttgcaagctggactccccagatctgtggctgtggggccctctcctgcctgcagctgagagcccttgacccgcacctgagggcttcagaggtccgggagggggatgtgaccgtgtccccagggtgaagcccacccgagtgtcactctggatacagccctcacctcttcctggccccctctctggtcatggggacgctgcctggggggggttcccttacatggaaggagctgcagctgagctggcgggcctcgcacacccccaaggccgcctgacttccagcctccaagtggggttgcattcaccactcaggacctggagcctcagccagagagggaccctccactgcctctttctctgtctcttgggaaaggtagggtctttgtgccccctcccacccagggacctggcatgttgggaggctaagaggaagctgccccccgctcatctaccccccaaccctcccagccagcagagttttacctgtgtgcttagaatctgtgcgtggagccagaagtcacaaggttggcccagctgtgtctgaccctggttgtgcggtcttggacagtcccagccctcctggagctgagcatcctgatctgtagaggagaggctgctgtgccggccccgcagggccctgtgcagaggggagtgtgtgcggctgtgagttcaggccatgccctcagactggaggataggatcggaacagtgggtcaggatggccagagggtcccagcctcaggaggaggcctccacacctcccagcacctccacaccaggaaatgcagccaggcccccaggcctcccatgtcaggaagcagcaccccgccccccacctctggttgcctgggcctgagaagttgagcactcctcccgaatccgagtgccctctgacccctgcttgggtagttgtccctcctgaactgaccgcctgtcctacacagtcccctgtggtttgcccgacagggtggccagcgagtcccctgcacagcacacctcccccaggagtgctgcctgtgatgatggtgtaaagggtgcccccccgagcccccggaggcatgcagtggcgcaacagcgtgagcccaggagccccggtgagctcctggatggagaatctgttcagatcactccccagcctaaaccttccctgggtgtctgctgtgcttggggcgctgactcatcgtggggcggcctgtgagaccctacgtcacctggccactcccctcagcccctgttcactgcaccggtcccctggcctggctgctcctggaacatgagggctcatcctcacggaagaatattcacttgttccctcctggaaagtccctccctagacctcctggccgcctcattcaggtcttgctgaagcgctgccatcttggagaggcctccctgtcacccgcagttaaaacagccctcccatgcctgtgggtggctttctatggggcatggatgagtattggagagtcttgccgtttatttgttcatatgccctctgggagggcaggggacactgacttgtgttgtgggtgccttgcatgtcacgggtgctcagtgaatgcctgttaagcattaggggagcacaaaggagggaagcctctgtccaactggagcagtcagggaagacttcctggaggaagtggtatctggtctgcttagaatgtggcgatttgtctgtatgcagacattagattagagggcaaaggccattatcataacttagcagacagctacaagcagctaaggaattgctatgacatggactgctcgtgattggagctaagaaggagtcagagacagaggtccctgtgctctggcgtgagtccttgggggaggctgagctcccagaatgtggggccgcctgtgcagaggccggaggtgggagacacacctgtgagtgccggtgagtgtggggtgagccactggggctggatcagaagatgggaatccctaaacccaccaaccagccttggtgccctgggagtgacaggagacggggcttctgggggactaacccagcacaagtggacgagatgggatgcaggggaaaggacaaagctctctgaggctttgggaagctgagttagggtagagccatgacagggtgagttccagaagcaacacaagaaaaaatagctagactgggttttcccttcactgtgggagatgccccacctcacttcccccgtcctccgggctctggcaatgggctgggcacagtgaatgggttccatctgcaggagtggtcacaccccttgggcacagctgcctcatacactgtattgagatgggatccgaggccgggaagaacagcttcttctgtaggttgacattgtcagccttcggggagggaaggacggcagggggcctggagcatctccttttgccatccacactctgtgcctgcctgcagggtcttgagccctgtctgttctgcctcagtcctggtcaggaacttgttggagcccataggggcagtcaggctggaacaggaggagaccaggccggcaggggagccgagagggggccctggacagcacccagggctgagtcatcctgggcctgcccgacttgctatttggagctgttcccgcttgctcatcatgtgcaaggtcctgatccactcgggtctgtttaaccagcgcccctccccaggcccagttagcctggttttcgttcgattcatttattgtcatcagtgccatccttgcaccacgtaactagcctttgcagcatgccagccaccaagctcagggccctctgtgcatctcctgtaaccctcacagcaacccgggaggcacagagaggctgagtcgctggcccatagtcacacagcaggtatggggcattgccaggatttagccggatctctgactccagggcctttccagggccttgggtgggacactggcaaggaagcaaggtatgaacactggccctgccttggacagagctcggggacggtggcctggcaggcccagctgacacagtgaccctggtgcaggttcaaccattggcaaagtgttcaagtacacacagaatctcaactggggagacaggcgaagcggtcaagggagggctgtgagtgacaggtggacactgtacctactggcagatcagctgaccttggtgccttctggagcctttcaacttccttatccagaaaaagaggaactaacagttccacccccaaactgggtgggagtaccacattcgaaattgaagcaaagctggtcgtgtcacaggctcggcagatgttagctgtgcaggcaacttagtgaccatttgaagtaggctgtgcggcggcatcctcatcttgcagatgtagtccagagaggttagggcactaaccctgggtcacacagcgacagctcaggctacagagagcagtgctggatgggagggtgttggcagcttcaggcacaggctgggagggctgtggggtcagcagagggagggcacacttcccagctggtggggttcccttgtgcctcagtactcatgtgggcccaaaggagctggaaggagggaggttagagccacccatgggttcagaagctgataagcaggttattgactctgaatttgcctcatcgtatgtaaattggggacaaatttggggatttaatgatataatgtaagaagcagacatgtcacagccctggttatacagtcagtgtataataagtggtaagccgtcagaggaggcagccggtgagaatgggagcatctcagcagccctccgccccctgctcctggttgcagatgtacctgttcttggctatttgtgccccagctccgtgtcctccggtgtgtgtgaggccaagctcctggggtggggacttgggggtgtgtctgcagctcctgaggccaagaccaaggctgaggccgaggctgaggctgaggccaccttggtgaggaggaaattgcaggtggagaagctcgttgaccgtgaccttgatctgaccgtaattttgatggtgccgatgccgtcagcacgcaggcctcctgccctcgccacgactggctcctgcagcccacctggctgagaggtgtgctggctctcgcaggttgcaaaatggggacatcaccgtccgcctgggctacagcgtgctcgccgattgcatttggggagggactgagggctgattgtgttgtggggatgttggcagagaatcagagagggcatccaaaaaggccaacagttcggtggggagaggaggcgcaaggctggttcctgttttctgggctttgatcgaaagggaacaggggacacatctggggacagtctccttcctggaggaagaagggcttagggtgctggtgtggagtttgcacagatggggataatgagctggagggtgctgggcaggagctggccagtaataggctgacgagggaggccctgctggctgggcctggttttcaagtgagcatcctgagctgcggggacccagggggtcttagagacctcagagctgagactcgggaccacagaggggtgggctgtgctcagggcaacacagcggatggggcagatgttgcgaaacctgtctctctgcctctctttctcctgctacagaactggatcctcccagctcatggctgtcaaatcctttagatgcttctgggttccatgggcgccttacactggcttccctgtaggacagcagaccctgggggttggctctgatggtattcaccatggggtaccccatgcaagcacagtgctttcacgcccagcctcccagcctgtggagtaggcctgtgtctggccagcctcactttgtggccagaggagggagacagtggttctggagacaggagctggcctggggctgccctcccagcccctgttctcccagctcatctccttgccttgcgggtgctggccaccctccccccgccagctccatccccagctttctctgcccgagccgtgacctgtcagtagggggcagtggaggccttgaaagtccttggagaggactttgaagcagtttttacaaatctgtccctggaaagtctctcctgtcacacccccagcggctccctccctcctaacatttttcctggggttgtcatgcagcggggggtggaggaacccactaggccgtggatagagcagagccatgttgacacaaaccctggctgaacccacatgctccctacagccagcggccgatcactggaaccagggaagtgacctcatagcaagggcccgcagagcagccatcacgcattcccgatcttggtttctggacccagctctggaaaagaagccagatcctagccacttggagctgcctagggaagaccccagcctggtgccggctgacagctcactggaacttttcatctgcttggccaggtgatgccaaggggcagaggttagaagtgctaagaagcaggccgagggtggtggctcacgcatgtaatcccaacactttgggaggccaaggcgggtgaatcccttaaggtcaggagttcaagaccaggctggtcaacatggcgaaaccccatctctactgaaaatacaaaaattagccaggtatggtggtgcacgcttgtaatcccagctactctggaggctgaggcaggagaatctcttgaacccgggaggcagaggttgcagtgagccgagactgtgctactgcactccagcctgggcaacagagcaatactccgtatcaaaaaaaaaaaaaagaagaagaacaagaagtgctaagaagcatctgtcttcctgattgaaaagcaatctttgctgggcgtggtggctcacgcctgtaatcccagctttgggaggctgcggtgggagagtcgcttgaggccaggcgttcgagaccagtctgggcaacagaggtgctaggggtagtggcgcttgcctgtagtcccagctcctcaggaggctcaggtaggaggattgcttgagttaggagtttgaggctgcagtgagctatgaccacaccactgtactccagctcctgggtgacaggatgagaccctgtctcaaaaaacaaaacacaaacaaaaaaccaacgtttatcttttgtgattttaaaaatcacacctacttgtgacaaaataattaaattagaaaatgtaaaggaaatgatcaataataattgcgtcctccagacaaacactgttaacatgttcacgtttccttctagtctttttctacatagacactcaatacttattaatttgttttgaactaaagatggttttctctgctttgtatgagaaccacctcagccaggcacggtggttcacgtctataatcccagaaagctgaggcaggcagattgcttgagcccacgagtttgagaccagcctgggcaacatggcgaaactccatctctacaaaaaaacacaaaaattagcctggtgtggtggcacatgcctgtgctcccagctcctcaggaggctgaggcaggagaatagcttgagcccgggaggtagaggttgcagtgagccaagatcgtgccactgcattccagcctaggcaacgggagtgaaatgctgtctcaaaaaaaaaaaaaaaaaaaaaaaagttgccacgttgtcacctctctcagggattttcatcctttctacttttcgcccaagacttgccctgtaaaaggatgaggccaaatagccatgggagggtggtactggatgttcaaaaaaatgtttcgtggctggcgggacttagaaacaggttggggaggtttcagcagagggtggaccccagctgggggtggggggcagcaggggggcccctcacatgctctctctgcgtgtttcatggggctgcctgtgaggccgtgtgaaccagagcccggctgggaagccacatgctacctggactctgacctttcctggcagcatgaccttagccaatacgctcaactatgttcccctctgtaaaatgggctaatagaaatgtccactcgagacatgatgagaaacaaaggtgttcatagagcaaagtgcttagaacggtcctggcatgacaggagcccacatgtcagtgctgccgttggcatcgtcatcatcacggcggcattggctgctttgtttctcccttgtccctgtcaccttcttccctcagcaggctctcattcacttgttcatttattcatggccgaggccccgtctgtgtcaggcctggtgctgagaacgggggtagagagatgggggctgtgccctgctccctgacccaagggttccctttgcaatgtgaagttcttggagactggaccctcaggctgttccaccagcccctcctcaggccagcttaacccttccgtgctcgttttctgagctgttagaggaagagagcgggaggaaggatggagtggggtttttgtggggactgagcggggggtgtgtgaggccctggaaatggtgcctgcggcactcacgcagcattagcttttgctgcagttgctgtttggagaatattcttggatttcaggacactgatgacagaaggtggaacgctttttctggaagccatcaagaggggaccaccgcggcggctgagcagagttgctgacttgtgagctgtggcctgaccacagtcactgttctcatgagcgaggccccctgtggtccccctcccaggaatttctggccccttggcaggggacagttcagggctgggggtgggtagtggtgtctgcaggccctcttggagtcagagaatcccctgtcgccgtggcggggctgttccctcctgcccctcccctcccgctgtgctctcagctgctccgacaggatgcttttggcctgagagacagaaaccccaactctgaatggcttcagccctcaagagaatttggagcttttttgtgcaaaatgagatgttctgagcatcgaggatgctgtgggggatcctccatcccaccatctccagccgtggtgtccctctcggtcacaggatgctgcagccacgttgcagggaaggagagcctcccttcctgtgagcctagggagcccctccatgcagccccttcactggccattgcctgagacccgacctggtggctcctgccccaaggagcagaaagggggttcgctaggtcagggtggggctgggtgcgaggaccccccccggccaacagggtctgcttaggtgtccgtcctgttggggcagcagggaagggacccacatgtggcactgggacacggagaggcttttgtgcctgtgacggccaaaagggatggcgccccagccacgttcccacccaccccgaggcccagcatggccatgccggaaatagcagcatcgtccccctcactgtcctggcttgctttcaataggccagaggggtggggctggagcgggcgtctgacctgtggctggatctagctgcccgtggacaggctgtgagtgaatctgcagaggaagggagatgggaatgccgggaccttctcctgcacctcccgaacccccgttccctgtgagttagatggggagtgcacccctgccctcccctcctgggtatcccctgcgccccccgccccaggcacttgatgttgcctgttcattttccctctctgcccctcccgctggcccttcccatatggtcctaattaggaccttccgcccgttggtggatgggcagagaggggagcttgctgtggggcctcccccgatcgggggacttcccagcacagagctttctggcctctgcagggacgctgtgtgtgcctgtgtgagtctggcgtgttagaagcgctaagctgcagctgttctgtgcgtttttcacatttctcacttctcaaaggccctgggtttggtgtctgtgggctggggatctgtgttggggtctccaggaggcccttggtgggagaggcagggccccttcccctttaatctgggcaaccttgctttggcctgctgtctgcggaaagtgccctaggatacggtggcaggactggctggggttctggctccaggcccagccccagcccctgtcagacttaccctccttgtgcctccgttcaccctgtccacccgcagggcctgcaggagcatcctgagagttggtagggtggcctgcccggcgtccgcacagggtctgctggtgggtggctgaggctgcggtgaggtctccatggctccctcgtcctgcacatccttcccttgttgtgttgtctcgctagcatatgagcccgtactgcctctgagtctgcagcctgttttccttaccaggtggctaagcagggtggcagccagggtggcagagtcccattggcctgcaggggaccctctgtgggctgcaggtagtcccctgtggttgaaggtgccctggcaggacctgcaccatgacccccgtcaaagctcacgtccaaggcatttgtgggcacccccgccccagacgtgagggttggcatcttctcttgcacgtgaagcaaaggcctgtttgaaggagcgtgtggaagcctgggtgtgatgaaggcaaggaccggtggctcacccctcttgcacctggaccttgggtggcaggcctggggccttcagtccttaattcaggagggtagccagtcgctggaactaagagtgaacttcagctgttgttgccatagctggagggaagaggggaaaggaggcgctgcaggggagcagagacctcacccttcctctgccgacatcaggctgccggtgctggacggggccctggcaaccgtggcaggagtggtgatgtccgatgatggtaacaagggcttcctgaggaccccgagctgtcttaagggctctttacctggagtaagtatcccctttaatcctcccaacaacactgtgaaattgattctgttgttattcccatttcaccgatgaggaacccacagcccagagatgttaagtaacctgcccaagcctccctctgagcatggcagagggagggtccgaatgcggaaagtctggcttcagtgcccccatccctaaccactgtcatttacctcttcggccagccctctgattgcaaaacctgaggcccagaggagtgcagtgacttggccagcttcgcacggcaggttagtggcagagctgagcagtgtctcccatgccctgattctgtggcttcttgaggtggctcacccctaaacacgccccccatggtggctctgtttcctcctctcctctgaacctgccagcctgtgctcaggcagggggagaagtagagcaaccatgccgggcgggtcgtcgtgccccagtgccgcctgccctacacctgattggcagcagagtggcccctccttggtgtggtctggaggtgccagtggtcactcatcagcacagcccagtctcacacatgtcactcccaaaggatgttgacacagaatgaagcagctaggggaggcggacgctttggcacgagggtggcgtttctggtaatccgtagtgctgttgtctgtggctgcctttggctggcatctcacctcctcctggctgtcctgcagccacctgagggaggtcagcatgtcgccttcatcccaggacagtgtgaatgcagcagcgcaagcttgccagcgccgcactgcgggatctggaggcctttgctcctgagccctgcctctgtgtaatccctaaagcacggacttcttaggggcttccattcctccacctggaaaaaccttacaccgtttagggcttgaggcagggctagagcatggagacgttgctggaggaccaagggagaactgagcgcgtgttctcttggcctcagcctcgtgtgtgtgtttatgcatgggtactttgccatccacactggcttccacggctgggtgggagttgagttgagctcggcggctgcctttccaccctgcgggcctggttggggagtgtgaggatgcctgctggaagccaacgtgcacgaaagagttaatggtggatcccatttcctcagccccctctccagctttcccagggaaagggcaggaacagagaggccttatcttcagaggaaggggtgggcggggacacagcgctgttcggcacagtcccctctgagccaccctgcatgtttcattccaccgacttctgcagcccagctgttcagagcggatccagaaggtggagagagggtttccaataagcagaggatggagtgaatgtgagattcattactgggatttggcaaagcaaagagcctcactttctccccgcagatgggacgggggcggggctggagccagcggggtgggggtatccagcaagagctccttcccatcctcccacttcctttgccatgggccccctcctccacgcagaccctcagcctggaatgatcagtgtccagcttttctcgcccctctcctgccccgctggagggagtgacctggcccctggccccggccacctacacctcctgttttgctgcactagcctcgtggtaggggctgcggcggaggtgggcaaaagccgcttccgggcagccagcccccatcctgggagtgactgaaagtccttgggggttcctgcagggtgagctgcccattctggccctggtaaggacacccaggagagggccagggtgcctgtatttggggcacagcataaagaacagccgtaagtgtttctcaggcaggagggtgccgaagcattgggaagctgggatttagaagcattgtttggggtggtgagtggaagatgcaggacacagattcacgcgattgtgcagatcacctggcctcactccctcggtttacagtggaggaaactagaggccgagagaggtgaagtgagttccctggggtcacacagcctagccaggcccagggcgccgacctcctgctctgccttcccgtgcccattcggttggcatcagcatccctgccttgacacccccgtgtggcagctgctgtgattctgtgactcctcctcaccccaccccagtggggccctgcgagggaaagaagaatgccctatgcagaagtggttggaaagcaagaagcctggagagaagtgaggcctctgtggtttggcctgagtccaggactcatggcctggttcccagggatggagcaccgacccctcccttctacacccccaccccacgcccccaggagctccctatggggaagccggaatggacctgggctcagagattgtaaattcatcttgctggatgtgtggctgcctttatgtaaccaactctctcacggagaagccaggggatggctctcagtactctcgggggtctctcagtgaggtgggaggacctcgagaggtcaggaggctgctcaagaccttctgcccctcagggaccaggtgagggcttgtcgactgctctgacctcctgatgcttctggtggggagacctcagaggggcctgccgtcaccatcgccagtggccctggcctgcccagtcatccttctggggtggccaaactccatgctgcaaaagcccaagtgaaccccagtagtggcctgggagaatcatctgtcacgagccaaggatggagtttctggggaggactttctgctgccccccaacccctttcgggtacattctcctgtagccccactccctgtaagaaagtcaggtgcctcccgaagcttctccctggccccaggccagaggtgacagtgggggccccttgcttgcgctggtgactgtggctggttgttggtgcctggccctgccctgcactgtgcacccattgaaggcggcatcatccgggcctctccggtggccatgcatgggtgagcagcccacgacacatctgcttccagcatcgtgtgggccggggctttcagaggggctgagggcttggatggccctgcaggggggtgctcctggccttgtgaccgaaaggagctgaaggtttggagaagccgttgggccgaggtcagttcttatagatttggcgaggagggaacagatgctcacggagctgctccaggcactgcacacactgcctcactctgcgctgacagccaagaggctggttccccgccgacccccattttacagataatgtgctcccccagttccttagtggtggagccaggattcgaacccacgcaggcagcctcctgggcctgtagtcctacccttcatctccctccaggacctatgtcttggggttggcaggataatgactcccagagttgagcacatcctaatccccagcacctgggactacgttaggtgacatggcagggccagctaaggtcactaatcagctggtcttaaaatagggagatgatcctggatgatccacacgggcccgctgtcatcacaagagtttttaaaagcgcaatagaccatctgaggggtgcagtgggagaggcttggaaggaggaaggaggccacaagccaagaaatgcaggtgaacagaaaatgcaggaaaacgcagtctcccctgcagcctcgggagggtgcgcagccctgtggacaccttccctgtagcctagtgaggtggagtgtgggactaatctgtgttgtttgacatcacaagtgtgtggtcatttgctacagcagtgatgggaattgaatgccattaggcagcagtgcttctatcccggaagaattaggataaattcccctgtggatctcaagctctgggagattctgggctcctctggactgctccagttctgcaatcataggaaaggtctcccatgtctgtttgggagaagaaaaccccgtagcaaatccatttccccttttgacaaatgaaggcgagggtgtgggctggacacatgtttcctttttgtggattttttttgttttaacacttagaattctgtagctgaaggagactttggggggttgtctgcctgatttgcaagtgaagaaatggaggcccagggaagttaagtgactggcccagggtcatgcagagtcatgctggaatatcaagctagatagcccagttcctgctccaaagtgctttcctccctggttggggaggagggttggagggagtggaccccgagcaacagcagcattggcaggggttggaagagtagctactgtatccaggtgctggagcctctggccacttcctgcaggaaccaggtgacccaccatggcacaggcctctccctgtctatctgcagccctgggggccccagggaccagaggacactctggcctgagggctggggcctgagagaagagatggaagtacccctagtctggcctgcccccgtggcgtcctgcaggcatatccggcagcccaggggtcctagagaacttggctggtgggcgtccccaccttgccgcagctgcaccctgtggccagcagcttgcaggacttgggctgttgcctgtggccctgaaacagtcattttctgagctgagtggggatcaggtgagcagatccccacaccttaactgctgtgatctttctgtcctggaggctggtgggcagcctggttggtgcttcatggcactttatgaccggccctgtcaccaggctcgtgagttgctcccctcctttcgggcatcctgaacggcttccctgagagccccgccctgggccttcgcctctgcaggcccccgctgcctggggcgcctccttcccctggaagctgggcctctttggggactcattaagaagggccttgccgagtgctgccaaattgccccatctggtccccatttgttccacttaccaccctattttaacttttatgtctcctccttggctctaagatctgagcaggcagggcctgtgaggcaccccaggtcccctgatgctgccagcacccaggggactgttagtacatatgcagggagggaaggaatgaaggaagagatgacttggggagtcctccagttcccatttgtaactggcacattgcgacaaaacactcatggcattttacctttttcatataccttttttttaaatttatttttatttgagatggagtctcgctccgtcacctaggctggagtgcagtagcacaatcttggctcactgcaacctccacctctcgggttcaagcgagtctcctgcctcagcctcctaagtagctgggattataggcgcccaccaccacgcccggcgaatttttgtatttttagtagagatggggtttcaccaagttggccaggctggtctcgaactcccgacttcaggtgatccgcctgccttcgcctcccaaagtgttgggattacaggcgtgagccactgcacctggctttcgtatatctataaaagagaatttgcccagaaaatctttcagatgcacctttagggttttaaggcacagatacatgaagcttgtcagtgagcagctgctgcttattcctttttctcttccaattcagagcggcctgcgtcccaagcggacagctgctcccttcctcttggctccctgctgcccacgctcccacagaagcagggagaagaggcaggaaggtgacgcgtgatcatccgctgggcgcccgcacagtgccgtctgcacaggtgccatctcctttacttgtcactctcctcgctgagccctttcccctttttgcagatgagagagcattgcctcccagaggttaagaaatgggcccagagtcactcagctgatcagcgtgcagccagatttgaaccacatcctgctgatctccatgcctgcaggcctggcctgatgagatggacagctgggtggtggagaccttgagaccctggatggctcccaaatagggcctgtagctcctggacagggagagtctggcacaaagggtttgtggagtgagctgggggagaaggtggcttagggtccctgtctctgaacaaacagatggaggggctattccagcgttttctcagcctctggtgtgctgggctcctggttctgggaggagagaatggagctggcctccattctgggctgggctggtttgggcccaattcagacaagcttcttagtttgccatgagtgacacttttgcctgccctggtgtctctgccaaaaatatgaagggtttcagaacccccaccccggcctgcttccctcccagacttggagtgggtctggggctgacaacagtctcatgccagatagcctgagcagccaccagtgccatcaggtctgacactgcggcccctgccccggagggaaaaacaaggccctctctgggggattttctgccagcttgtgaaaacaggcctggagtcagccagcgcccccatgcttagacacttcgtgtggttttcaaagtgcttttatgttgctagctcatatgatcttccccaaaaccccataagggagggcaggaagtttgagcaacagcctgtcaagcacccatacagcaggtggtttcattgccctccatttacagacaagtaaactgagcttcagggtggctaccgcttgtctcccaagccacccagccatttagccacggaagaggtcatgactttttacaccccagtgaagctgaagatttttctttccgtttttaaaaatgtttactccccagggcagtgaacacctggtgcctctgtctagcgcaagaggtgaacgtttgccacttccgtttctttcctcctaccagacctgaccctccttttgtgacgggaacatcctgcaggcagtctgtcctgctttcatagactttgagaaacggggtccaaattgccggctgtgggtgggacaggcgacactgcagtgaagaggtggagtatttttgtagcggggaagaaatacatttcctctaccctcttaggttcagtgtttgggggtctgtgaattaaactcactcaagataaattaatgagagaaaagacagatttaatcacatacgtatgggatttcactgaaaaacgtgactcaaaagagcaggtagaaggtggggcccgtgactggtccgaaggtagtgagttatctcagttgattgttcacagtcagttacagattagactccttgttccactgtctcccctcttcccacttgttttgttttttttgagtcagagtcttgcactgttgcctgggctggagtgcaatggcacgatctcggctcactctaacctccgcctcccgggttcaagcgattcccctgcctcagcctcccgagtagctaggattacaggcacccaccaccacgcctggctaattttttgtatttttagtagagacagggtttcactatgttggccaggctggtctcaaactcctgacctcgtgatctgcctacctcggcctcccaaagtggtgggattacaggcatgagccactgcacccagccaactagtcttaaaaaaaaaaaaaaaaaaaaaagaacttagggcccgtatactatcttaataggaaaaaaggaaggggtgaaagcacatattatgggccgggtgcgatggctcacgcctgtaatcccggcacttcgggaggccgaggcaggtggatcacctgaggtcgggaattcaagaccagcctggccaacatggtgaaaccccgtctctactaaaaatacaaaaattagccgggtatggtggtgcacacctgtaatcccagctacttgggaagctgaggcaggagaattgcttgaacccacgaggcggaggttgcagtgagctgagatcataccattgcattccagtctgggcaacagagtgagactgtgtcttaaaaaaacaaataaaaaaaaaaaagcacatattatggcaaaacaaatgagtttttggaaagataaataggcccttaggagctgagatgggagatgtgaagtcttgtgacaatgtcttcttaggtgtggtgtggaaactactcacatcttccagggaagagtcagttgctcccagggagcagatttgggcctgtataccatcttaataggggaaatggaaggggcaaaagcacatattatgggctgggtgcaatgtgcccagtgcaggaggcagacgtggtttatggttgctgttgaaaccagtgcagggcccgattgctttgtattgagtgttgaggatcctggttttgtatcagccatgagtttgcagctctgggacacacttgatgttggctcaaggggaaatgaggttggaggggcagggtggttggattggatgtgggcctggggccattgctgatctacaaagtggtcatcacacgggaataatagagctggctacagaccacaaccagcaatattatttaaaagtaaggtcacacttttaataataagtcacattttaagttattatcaatttataaaacacactgttggtataatgatagcttttcaagaaggatataaaaaggcatgttgggctgggtgcagtgactcacgcctataatcccagcactttgagaggctgaggtcggcggatcacttcaagccaggagtttgagaccagcctggccaacatggtgaaaccctgtctctgctaaaaatacaaaaaaaaattagcttggcgtggcggcgcatgcttgtaatcccagctacgggggaggctgtggcagaagaatcacttaaaacctgggaggtggaggttgcagtgagctgagatcgcgccactacactccagcctgggcaacagagccagactccgtctcaaaaaaaaagaaaaaaaagaaaaaaagtaaaaaggcatgttgaaggtacctgcttgtggaaagttgcaacttgacgggaggtagggcgagcacttcttagaaaggtggaaatgggccctcctgctacagagacccacaaacatagactgaggcctgcagcctaggagactcaaaagaggcaaaggtgaataagagtcaaggtctccaagtcagggtctgactctgggggtgggggtcacatatgatggaggatgtcaggagggcttcctggaggtggtgacatttaccaggggggattttaggtggggtttgcgagacagtaggacctggctgaagagcgtaggctccttagacaggagtgggaattcaggcttgaaaatgagttggccagattgcaggggtcctcgaatgcaagggaagaatttcaactttaacagaggagcctgggaagctgtttgggaaaaggagtgataaagcgggaggggtcctccagcagagccctgcatgggcaggagggagcgagatgggaggtgggtgttggtaagggatgatcccagtggtccaggggagcagtcatagggtggaaactaaccttgtggggtctgggcaggaagggactgatttgagacaccgggaagaaacagccagtaggactttggtgagagggctgggggtcggggaggggggtgtggagagtgggagcttgagtctctgaaaacagacagtgttccaagggggagacctgaggcaagatgtggagaggcagctgagctgggaagctggaacggaggtgtggtcactccaggagactaagtcagggggcgaggggacccttgggagctatctagaccccagcactagggaatacggaggggagaaggaggggagaagaaccagctggtgcgtgtcaggcactgccctcgaggtcagatggggtggggctggatactggccatgaggattttttcaagagctgggttaatagtgagacgggcggacaccagatggctcgggctaagaagtaagtgggcggtgggaagctagaagccgtggtgtagacctactttgagaggttgggctgttcagacagggagaaagttcacagtttgaggaggtagataggtcaaaggaagagggtttgcttgtttttgagattggggcatcctgaacgttctcccaggccaagtgagaagaaaccagaagaggaacatgtcacccaaatgtgctgaaacagcccagcagctgcgctgcctcacagaaaatgtgcagaggcccctctgtcccaccatgcctgcctggggacggccttcactcgggctactcagggtttccccagcctgccaacccaagggtggcaggagctgtgggtgctcccagccccttctcaaggttggtctgtgggtagaaatgtgggctgcctcggggcgtcacagctacaaatgcataccagccctcagaaccacattcctgctccccagccctttcctccgcacccccatgcagaagcgcggccgccagctcacaaaggatagggagggatattgctcttggcatttgatgggaagcatctgctgcatcccattggggtgttgcccaggatggattggaaaagagttggcaggaaggctgagctctgtgctcacaacctggcttggtggtggccgaggagcttggcaggagcagagtgcaggacctgggaactgggggttggtgcatgtgtgcacgcacgtgtgtgtgtgtgtgcgtgcgtgctgggtgggtagggaggaagctgtgaaaccacatcccctcctctctgctgctgtgttgctgtgtgtttcagcagcacgtgggtgtcaccacacttcctagcaggtgtcaacctccaagactgttctgggctcttctcccagttggctgagttggaggtgggagtcccaactgtcccctgtggcttccagagtgggaccttgctgtgggataggctggccaatggtgctccctcccctgtgacccttctgttgggtgggtcacgaggaaggactgtgggtgttgcccacagacaggtggacatgtggcaaggacaccttgggaccttctttctgacgccccttgaagggggcactttctcagctttgagatgagtctctgtggatgtgggaagttcactatctcaagagcagcagccttggaaaatccaacacagaaccccgagtaggggcgggaaggggtcctgtcccgctcactggctgcctggcagagttctgcacaaggaagcgcctgtgttgctgtgggcggaggaatggactgagggctacattcgcttcctgttgccgctgtaactgcttatcacaaactcagtggcttaaagcaacagaggctccttcctttacagtgctaagggtcagaagccgatcagtctcaccggactaaagtcaaggtgttggcagaatccattcctgcctcttccagctttgggtgggaggctctgctggagttccttggcttgcggctgcatccctccagcctctgcctccatcctcctacagcctcctccttctctgcagtcagatctccctctgccttcctcttttttttttttgagacggagtcacccaggctggagtgcagtggcacaatcttggctcactgcagcctccgcctcctgggttcaagcgattctcctgcctcagcttcccgagtagctgggattacaggcatgtgctactacacctggctaatttttgtatttttagtagagacagggttttgccatgttggccaggctggtcttgaactcctgacctcaggtgatctgcctgcctcagcctcccaaagtgctgggattgcagccatgagccatcacacctggcctgcctccctcttaaaggacgcttgtgatttggggcccacctgggtaatctcttcatctcaacatcttcagttacatctacagagtccctgttgccacatgaggtaacacagtttgggaagggagagttattcagcctaccctaggggcctgtggtgtatctcagggcccttctgattttaagatataaagcaagaaaacaaactggctcaaggggaaaaaaggacacgttgaattctgttgctttaaatgtatatttttttattgtgctaaaatgcacagaacataaaatttgccattagtaacactgagtacattcacagtgtcgtgcaaccatcagcactgtctagcgccagaactttttcatcaccccaaagggaaaccccgtatccatgaaggactcactccccattcgccctctccagcccttggcagccaccagaatgctttctgtctccataaattcatttttaataagtgcaattctgtgtgactttaaaataaataaacatgagcacgatgagttgcttattggaaggatatccatgcggggaggccggcgtgtggagtgcgtaggcctccggacgggcaggagttgaaggggcgtggatgtgccgccctctcctccccttgctctttccttggggtcactgcctgagtatccctctttgcaaatggccccaaataatgtctcagcccccacgtctgcatcgcctcctagcttcaggaccctccaccaaaaaacattccaagcttcagactcactcctgggaaaattccaatggcctcactctcccttttgagccagccagatcccatggcctgtggcgggctgcctttgagtcctgagcacctgtgagctagggaagcaggacaggcacacccagggaaggggaagagtcgtcgtcagtcacagtaattgatatctttggaatcgtctaagagatacttagcgtgtgcctaaaacattcatttctttttttgtttgttttttgagacgaagtctcgctctgtcgcccaggctggagtgcagtggcgtgatctcagctcaccgcaacctcctcctcccgggttcaagcgattctcctgcctcaacctcctgagtggctgggactacaggcacacactaccacgcctggcgaatttttgtatttttagtagtgactgggtttcaccatgttggtcaggctggtcttgaactcctgacctcaggcaatgtgctcgccttggcctcccaaagtgctgggatgacaggtgtgagccaacacacctggccacattcatttcttaggagaagctctgcattttctgaaagtgaaatgtccccaggcgggtgacactgatggtgggatctgtggcctcaccagtgtcttatgagagatgccgctgtgtgtttcaccaagctgtatcctattgtcctctaaatgtggcttgtagacatggtgccgagaatgatctgggaggttcaaatcataatatggtccaaatcaacagctctctgatgacctggtattatcctaggatcaaattgagactatccgaggatgggcgtggtggctcacgcgtgtaatctcagcacttcaggaggctgaggcgggcggatcaattgaggtctgtagtttgagaccagcctggccaacatggtgaaaccccatctctactaaaaatacaaaaagtagccgccggacatggtggtgtacgcctgtagtcccagctacttgggaggctgaggcgggagaattgcttgaactcaggagacggaggttgcagtgagccaagatcacgccattgcgctccagcctgggtgacagagcaagactctgttccccggcaaccaaaaaaaaaaaaaaaaattgagactctccgagctgcactgtccagcatgatagccactggctgcacggggccatttgaacacctgaaatgtggtgattccaagtggagaggtgccgtgtgtgtgaagtgcactctgggtttcagagtcctagcaagggggaaagaaaagaatatcaaatatctgtcatttttacattgattacatgttgaattgataatattttgggctctgttaagtgaatgatattaaaattaatatcacctgttcttacattttttaatgatttcctttttcttttcttttctttttttttttaaatatggggtctcacactgttgcccaggctggagtgcagtggcacgatctcggctcactgcaacctttgcctcccaggtttgagcgattctcctgcctcagcctcccaagtagctgggattacaggtggctgctaccatgcctggctaatttttgtatttttagtagagacagggttttgccatgttggccaggctggttttgaactcctgacctcaggtgatctgcccacctcagcctcccaaagtgctggtatgacaggcgtgagccactgtgcctggcttgttcttacattttttattgtaggtgctggaaaatgtaaggttgcgtctgtggcccatgtgccgtttctgctggagggttggaccgagggccagccgagaaggctctggggctgctctacctgaatgctgagtgtgtgctgagcggtagagaactttgagaagtgctgaaggacagaggctttgtgtgggggatgcagccccaggccggagatgccttctctgtgctctggagaccctcatttggtgacagcaagaggaaccactgcaagaggggcggccacctcagcaaagcacccaggatgctggcctcccagctcaggaatccagaggcagaggaggggaggaggctgggcttggaggagagcagggtcttgggccctgggaaaagcctggggggccagaaagctgggggacagattgaggccagaggcaaagagaagaaggttcggagaggagggccaaggaagaagggttctgcccacggggagggagaggcccacggggcaggggcgtggtgggagctgcatcctcgaggctttctgttgaccctgacacctggccagaaaggagttccttctggcatcctttgtcagcggtttctggagctgccctttaggggccagtgatgagggtgccctgggctgggctgcagacagtggaaaagacaggctcttctcactcccagtgctggggaaattagcttcttggaggaagggggagctgtattttctgagtggccgcacttcctggcctagacgtgtgtgtcttgctgtaattttggcgactggtgttggtggtgcccattttatggatggggaaggtcaaattccacagatattgagtgacaggcccagggccttggatttcagtgtttgactcagaacccaggtctctgatctgccaccagcctccctcccattcagatgggaacagggactccgggcatgcagtcttctcccagacactcccccggctctggcctggcgcccggagaccagtagcagcagctccccacggccgttcactgtgagggtggggagggccgtgggaccaggaggccttagggggaaagttggccatgaggagtgggaagcgacgggtcagatgccagtgactgctggctggggagccgctggacgtggctggcctgtttggccagtgtggcgggtgccccggggcttcagtcacccccagccacgtgtgggggtgcgggatgggaaaggtaagagtgtgtggagcccagtcagcactcaacatgaggtcccgtgggggctgcctgagggcgtagcttccagaattcagcccctggccctcagaaggtgtcaccaaaggcttctttccatttgagtgaatccctcccagcccccagcaagccctcggaacgagcccactcccaggcgctctctcctagtgtgggagtggccacgcccctgctgggagtgactcacttgggttcagaggtcgtggcactgagatgggtctggcagatcccagcgtccaggcccagcccctatagtgtcagctccctcctctggggacccccttgcttgtgcccctctgggtcccagcacatcccaggcctgcagggagggggagaggaagagactgactcactggccaggtcccccaggggctggagaggctggagaggcaggagctggatcagatctgaatccagaggctctcggaggaagagctcagggtgagctgcgcccccatcccctgcccctcctctcctgctccttctcccttccatggtcccagccagcaagcacctggggtagaggggacaaacccaggtggctgtgttccagccctggctgcaggtctgaatggctttctggggtggctggccatgctccctgagagcccagctgtggcgatgtctgagcaggtaggtgggggagcacctaggaagcaggggtgtcaggcagagcacaaggagagagggtgtccaggtcagtttcaggacctggctgagaggagggggctcctcacgggcaccgcctctggcaagcacagggacaagggcaaggacggcatggccagaggtccctgggagcctcttcccctctcttcttcctagcagctccccctcactcttcccagggaccctgtcactttcctttagcgtgtggcagctccttggcgtccctcccgtgccttcaggttgcttctgcgccgggcctgccgctgggcgcccctatctctgcctgccccctcctcctgctcccctcgccctgcccccttggagcaattccccaccgagcctcccttcccaggcagtcgaggtccctccctacctctgccccgcgctctgggaggctccttgttccgcgaccacaaagcccctttgatcctctgctcggctctgagccatgtgacccggtgggcgggccgcggctctcggcgcgtccagcgcagcccgacgttccgctgctggggtgagtcctgctcctttgttcttcccagccttgcaccactggctcgggggctctcaggtggcgcggccgcgaggcggaccctgatggccatggtggcggtgccgggagccacgctgtccctgggccccggcccgaggccggcaggaccgagcggggtccccaggagaggggtggcggggagctcgatctccacgcggggaccagattttcggcctcaaaatagaagaatagggctttgtgtggtcacagctatctctttgtaaatatttggccaactaagctgagtggctaagttctcctgctgcccggagcttcttggaacatgtttccttttcgcaaggggtttccctggcttccaggagggccaggaagaaattcgaattggccaccgctttctctaaaatcactccgctcaagttatcacccctctgggctcccgaagaccggctggctggaggctggagatagtctcaatgctcgaaatgccgtaaccgaagctccccgcggcgccggcactgggatccagggagctgctgctacagcgcagctctggattcctggatgtgttggatatgtgcagggcgttcctgggaggagcggggagggagggtgctgctggcggggctggtctgcgtgtgctttgcttctctacaatggcatgctgcgtgtcggccatgcagaggcatgtcagtgagcaggggctgagggatctccctaacggacctgctttcagagggtcttttcatgctgggagaaccccagagactaaatcatgcagccaacggggtggtccccggcctcaaagcagggaggggcgaggagctttgtaggcaatgccatctgctcctgaaacgccgtcccagtgactctggggactgactcagcctccagcctgctgcacttcatccctggcccctctctctttgctttttcatgtgaaatctgctgtgttttggtcagaggtttggggaacagctctctgctcatctaagataagtttgtaattcctttcctggagaaaaatatgccacccggaagcaggttgagcagtggttttctggcaggtctgttcggggctgtggagacagcacctgctggatcaggatggagttggaatttggtttggatcccacatgagaaaacccgttggaagaggaggaagcagaaaaaggccccattccctaataatgctgtgggttttcctcctccattcattgccaccttgccttgaaacttaatggggccacgtgtgtttccatgaatgtcattctctttggccaactcccccggcagccccaggagctccttttcaggaaaaggaagaaggtgtttgcttagcatctagtatacgagtccttgttggaaaggtgggattcttgtttctccttgggtctcttttaggctgagatgtggtcaaggaaggcctgtggtgtggctcgccttttttaatgctcgtctctggagacctgagttgctgctgactcccagcttgccccttctgtcccctggccatttctgtgtcggggtggctgagacactattgcattggccactttgtgttcccactagcccccgcccctgtaggctgtcattgtgatggtgatggggccaattcagctgcggtggggaggacccactgtgtgcgcctggggggtggcgtggggcactctgggatgagaagatgcgacttctgccctgagagccctgctttaatggaaggcgggggcatagttgcaggcagaagccatcaagcactgtggtcagaccagcattccatgtcaaaaatggccttgttggccgggcgcagtggctcatgcctgtaatcccaacacttcaggaggccaaggcaggcagatcacctgaggtcaagagttcgagaccagcctggccaacatggtgaaaccctgtctctactaaaaatactggctaatccgggcatggtggcgcgtgcctgtaatggcagctactcgggaggctgagacaggagaatcacttgaacctgggaggtggaggttgcagtgagctgagattgtgctactgcactccagtctgggcaacaagagtgaaactctgtctcaaaaaaaaaaaaaaaaagccttatctgggcctgggatctgtcctccgaacactgggtccactgtgctccacaaggactttcaccccggaagccctagacccacttgggcaaccagagtctctgggttgaccactccccagccctggccagcctcctgggccaccgtattctcccaacttcctgttgtgccacggctggtccaagctgctcttatcagacaatgcgaggcacttccacaggaggggacaaccccgtccttaggagccccttctccctgcccccaggcctggtgcagtgtgtggcttccctgccggtgtcaaaggtctcaaggcccctttaagaagcctgtcaccaccaccagcagcttccgttatctggttcttctgtacatgtaagcctttcccatacaccccggatgtttagggcttccgccctctctccctggccgggagtgtgggaagagggctttatttcaatgcttgagagtagggtcaatggccagggtaagctgtgggggctcctccccgccggcccctctctgcagccctcaccttaacacagagcatcgataccacctgggctttgggaagacctggaggctgaccaccctggaggctcccagcgtcccacagccactctttggggaagaggcttcctgagggacttgtggcccttggctgggactctagtcccagagttctgccttccggcgccgagctttgatttgtttattgagtgccagcccggttcccggacaggtagggacctgttcccggagctcagcagagccttgggaagctttcccaggagggctcccgagggtggcggccatgcccagtccgctgtacgtgtgagtttgtttgatgaggaattggctgggaaggcgcgggtctaattacaggcccatgagggtccctctcgcccccacccaggaagcagcggagatcctggcacactcagcacctgggcctgtgcctgcccagctgctggtggaatcatgggagccttgctccggggcctgtagagcagcagtgggaaccttccccacctcagcccctcccagagttggctgttcaaactcgccgccgctcagcctcttcctcctctctttcatcaaccctgggaatcgcacactgcccaccccaccgggccccggagcgggtgcaggaagagagagcttaacacccagaggtctgggccttctgcaggcgcctgagctgctgtggcctgagctgggttccctgctggaaccatcacagtagacctaatgatctgcctgcaggagttgcttcatcccagccgactccggggctgcgggaaggggctgggccttggttttgctgggggtggggggtcagtgcaaagggcctgaaaagtggcagaggtgatggcccatctgtcctccccctggccggccggcctaaacgcgattggctctctttcttttttttttttccctcccttttccctataaataacactaaatgcgatttgtcaatgcattcatttgggttcagtagttggaccatgggcagaagcactccagatttgtcactttccctaagctaagggtggggaacaccctctgtgagatcttggctcctgagcgcccaagactgctcttggaaccccaactctgggtcggtctcaggggactgacgttgatggagttgctgacattgacctccggcctctgcatggccttcaggaagggggcccttcgctctctgtcccgtcgagcctggctggcagcactcccttctcaggcctgtgcccccggcagggcctgctgcccccgccctgctctgtgggtgccaggctccaagcaccaggtgactcggtcactgaatggtcactgaacagtcatccttgctggtgtccccagtggaatgtgcatggacgtcctccctcccccagatccttgtcttttatctctcagcctttgttccaggggccaccacaggaccaggaggtacgcagacgtgggtggcacatccactgggcagattcagccctgaacctgcacgccccctccaagggggcccccagcgggcggggttgatggtgccgtctctctctctgtcactagaacggacatgaggattgtgtcttgtcgatccacgtcctgagttcccagacgtcataggtgcttgctcaacgagtgtttgaatgaatggtcagcattgtgtgaccgcagattttcaacttttatccaaatagtttgtggtttctgtgaggctatcccgagacagtctcacaagaatctccattctccctgcacgctccgcacaaggtctccttggggggtttttcagaaaaagggccaaagagcagcatttcctcggggatttgaacacgatctcccccggggcaggggactgccctggaagattcccggcaccgcttcccatgcgccacgtgactaggagggtcttggggcaggatggtgtcttttgtgccttgtgtgctggggccggaggaaacactgcccgtggccggtgtcatctgccagccctgaagactaatgatgggctggacagtggccccattgagtgggagggagaatcgctgctgtctgtagctggggggccgggtgggtgggagccgaggccagggagaacagcgcagacctggcacggagaggcctggaggaggagcagggggtctcagccacccagggtgcagggacgccacacgaggagcaggtgtggtgtgcgtcctcctgcgggttctccacctcttggcttcgttacctgcactaggctttgtggtgagagggcacagagtggaggaaggtgccgtggctagggcaggccacacgctgtgctaatggattgctgttacctgtcgcctctgtggttttgctgtcaggatcctccagcaccaggtccccaccaccaggtatgggccccacaggcactactggctccccgaagccagggacagaccccatagacaatactgagtccctgcagccagggatgggcccccacggccagtaccagatctcagggaccagcaccgggtacccacagccagggacaggcctccatggccagtaccaggtctcagggaccagcaccgggtacccacagccagggacgggcccccatggccagtaccagatctcagggaccagcaccgggtacccacagccagggacgggtccccatggccagtaccaggtctcagggaccagcgctgggtccccacagccaaggacaagtccccacggccaataccagatcccagtgaccagcactagatgtccacagccagagatgggcccctatggccagtaccaggtctcagggaccagcgctgggaccctggatgactgaaggagggcacggttgactaaagctgcaggagccagcctggccatcctgaggcactaagccatcactgcggtctcaggggactcagactcctctacttgtcttcttgaattctggaatcagacacacctgggtccagcctttgcccccggggctgtgtgcctgggatggttgcctcacctccctgaagctcagtgagatggggacggctgcacagggcccggcacagatggcacccgatggcacagggtcacctgcttgcatccatacagcctcggccctcgctctggctgcgtaccgagagtcccatgcccagacctctgctgagtctccaagctcctggtcatgcctcaggcctcccgtgagaagcatcactgcatggaccatgcctcgggacctcaccttgggctgggaagcttgctccatctccccaagtctcccctagaggcgccccatgtcccatcactctcactgcttgaggggtcagataggggaacccagtgtgggaggcccagaggtgccggagcagacgttaagcgagttccgtgtttatgcgctgggccttggcagacaccctgaatgagcctcttccccaggaaggagattggggtcccagtccaagttgtggcctcaaaccctgtgaccaagagtggagaaaaggcaagacccctcctcccagtcttccagaacagccgatagtggtggaaacatggggttcacactgaatttccttgtaacttgttgaagagaatttagcccacattttcaggggtggaggtctggccgatttggcagtgtgcccgtccccctggccacagtttactctggaccgggcaccctggtgccctccctcagtgacgcagtgaagtcactatgacgtgtttagttggtgagaaagtgcctcctgtaatgttttactcttcttagagggtgaataagccttgtttattataaataattatttacagaatacatgaggtttaacctaactctgggccacggcagcgtcccctgggtaaacccacgcgccaccctagctagagcctgtgcccccacaggcttcctggactcaccctgaaggggggctggattttctgcctgtcccgatgagagggctgcaggacagtccccagcgagcccttctgagggctgtaacctcttcccctggtattttcctgctcgccaggaatgtttcaagcttccagcagaagcctacccaccatagtcgctttccaccctgctcaccatccctcctgccctcactcattcagcagaccccgtgcacagcccagtgcaggactcagggtgggaaggtgtcccgggtgggctggagcaaggttcccagccagggcggggtcccaaggtgggtccacagccaggactgtgatttgggaggcccctccctgccttgttccagccccggcaccgccgctgtccttgtgctcagtggagactcactggctccaggctctaaaacctcagcgaggtctgcagacagggaggagccccactcgagggtagagtgactgccgggtccatttgcctgttacgaaccacgtggcctcagacctgccattcctcctctcctagagctatggtcttttgtctgaaaaatggataatgatggttaccatgtcagggaccattttgaggacaaacggggatgaaactgaagaggctcagcacggaacctggacacagaagtgctaattgtgtgttaccagctgcggtggctgccaaggcccaaccacatggcagccacgggctgagtggcgggcgggaagtggggagcaggagcatgcaagatgggcattcctgaagtttctgatccagtgagataagtacacacccagctctaagatggagtgtcccaggaaggtggagactgcaaaggccttgtggcgcaggagtgtgagctgcacctctgggctctctagaatttcaccagagctcagggaggaggtcagctcagatataggggcaacgggagagatgggagtgagaaaatggcttggcgtctggaagtggagcctggaaaggtgggcgtggggacagaggagggccttgggggccatgggcccatgcgtccaggaggtggaggcagtgaacggggccacggtcggccccacacgtggcaccaccagccctgctgagcctgcacctgctcctcaggccccctgagtgccactaccacctggcaccccttggtctgattcctgcttcctgcccgcctgggaagagtgagaccacttgcctaaagtcccttagctgtccttaaccattctggctgcctcctggccctgtccagggttagccgttgacctgaactgcctggtgccacctccccagactcctggggccttgccctggcaccaacagccacctccatcttcatcattcactcgcacattcacccagcagtgctttttgggcatccactcagcaatatcaaggcgctgagatgcggctgtggttaagacccgggcccggtctgtgaggacctcgcagttgccatttccccagagcacagccccagccaggcacactgtggggtccagaaagagaaactaatacattgtgttcgtccattttgagttgctataaggaatagccgaggctggggggttatttgactcacggttctgcaggctgtacaagtggtgccagcatctgcttggcttctggggaggccccaggaagcttttcctcatggtagaaggtgaagggggagctggcacgtcacatggcgagagagagaactcccagactctttttttttttgaaatggagtctcgctgtgtcagccaggctggagtgcagtggcacaatcctcggctcactgcaacctcagcctcctgagtagctgggattacaggcgcatgccaccgcgcccggctaatttttttgtatttttactagagatggggtttcaccatgttggtcgggctggtcccaaactcctaaccttgtgatccacccaccttggcctcccaaagtgctgggattacaggtgtgagccacctcacccagccctcccagactctatagcaatcagatctcccggactttgtgaccgtggggagggcaccaaaccatccatgagggatccacccccatgacccaagccccaccccccccaggccttacctccaacatcagggatcacatttcagcatgagatttggaggggacaacgtccaaaccatatcacacgtgacctctctgtgcgtgcgtcagtttctacatctggttaagcagtagaagctccttctctgttccttgttgagagagcggtgggggagaaatgactcagggatgggaggctggtcccccgaggggccctggtgtttgtggagtgggagtgcgggaaggcccctacgttgtgtgtgccgtgctgggctggctcctcacagctcaccgtggtgctccccgaggactgctggggaggaaagagctaattaacttggggacccagctgctgaagttatcattaaacttgagcagtccaggggcccctctccttctgggtcctatgtcacccagcacagtggggcttaattgaattttttctcatcccccaaggctcctggctggcgtggctggggtttgggatacggggagcgagagggcttgggcctcttccagatttggagtgggttcaccagaaatggcccaggaaaccgcgggggccacccccagcagctgggggctcctgtggtcatttcctcttggtcctgttgagcagccctggcccctggagccctcagcaagggatgtgggggcctgccaggccagggtcctcactgctgccgctatgcacagctgcatcttgcatccggggagtggggtgccgagtggggtgtttgggaggcaggttttcccttgtcccttctgcccagagaccttggggatgagttgagtgagacccttccggcttctgactggctgtgtttctgttgccatcccccactccttttaagtggaggtttatgacttccttctttatttaaaagggtcatttagtgacttagcagatcccagtctgtgttacccagggcccttttaaaaatctgtggggaggctgggcttggtggctcacacctctaatcccagcactttgggaggctgaggcgggtggatcacctgaagtcaggagttcgagaccagcctggccaacatggagaaaccctacctctagtaaaaatacaaaaaattggctgggtgtggtggcacgtgcctgtaatcccagttactcgggaggctgaggcaggagaatcactcaaatccaggaggcggaggttgcagtgagccgagatcacaccactgcactccagcctggacgacagagtgagactctgtctcaaaaaaataaaaataaataaataaaaataaaaatccatggggggacctctgtgtccattggctggtgtgaggagagggtgaggagctgcagagaaggtaccaggctgaggaccgcccccacccttgggctacagaattgaaggaggggacacatgaaagatgttcctagactcgggctggaggctggggacatccgagggcaaggacgacgctgtccctgctcttgtttgcagaggagtgcacagggctcaccagcttcttgttgctgtttaagtgatagctttatggagatagaattcacatactgtgacgttgacctttttaaaatctacagttcaatggttttgctgtattcacaaagtgattgtattagggtcatccagagaaacagaaccaatagaaggtgtgtacgtgtgtttagataaagagatttattattatgaggagttggctcacctcattacagaggttggcaagtgccaagattggcagagtaaatcagcaggctggagacacgggagagcccatgttgcggctctggtgtccacctgaaggcccaagacccaggagagccaatggcgtcgttccagtcccgagacccaggaaaagcgcatgtgtcagtttgagtctgaagcaggaaaaatctgatgttccaggttgaaggcggttaagcgggaagaattctctctcactcaggccttgtgtcctcctattcagaccttcaggcctttgtcacaaaattacaaagacctgatcagaacaaaatctgagaaaaaaccctttccttctatcggttttggattcattggctgggaccctggaaattagactgacagagattaacaggaaacaagcataacaattcaagtaagttttacttgacaccgagccttcataaggaaatgaagacccagagaaaccgttagcctgagcggtttttgttttgttttgagacaaagtctcactctgtcgcacgtccaggctggagagcagtggcccgatcacggctcactgcagccttgacttcctgggctcaagctggggcccagctgccggccccgggagctgctctgaacccactcttaagtcccagctcagactcccaagtagctgggactacaggcatgtgccaccccgcctggctaattttttattttttgtagagacagggtcccactatgttgcccgggctggtctcaaactcctgggctcgagcaatcctcctgccttggcctcccaaagtgctggggttacaggtgtgagccactgtgcccggcctaggcctgaacagtttttatttgttttgcttgttttttaaatttgtttgttgcttgttttgagcagtttttttgtttatttcttttgcttgtcttttgcccaggctggagtgcagtggcatgatctctgctcactgcaacctctgtctcctgggttcaagccattctcatgcctcagcctcccaagtagctgcgactacaggcgtgtgccaccacacccggctgatttttgtatttttagtagggatggggttttaccatgttggccaggctgttcttcaactcctgacctcaagtgatctggccaccttggccttccaaagtgctgggattgtaggtgtgagctgctgtgcctagcctaggcctgagcgtttttatgctgggtttgatgaagagtggaaagtcgtgggaaactgtgacagagcaacaaaagatgagctgaacagtgagcccgtgggggtctcggcaagacctgtgtactggggcccctctcagatcctctgtctctggagatgaggctgttcctttccgctgggtgtagggagggcacctcttacgtgaggggcttatgatctacttcagagaaggggcaggtcagtgagttcttcttggacctgccatttcttaaattccttcagctgaaaatatttactatgccaaggcactgtatcttggagtgtgcgttccaagccctgttgccttcaactgatcgggtgaggcccacccccatcagagcacacagtctgctttacccaggctcctgattgcacccttttcctgtttgccccgagaatactcaccagcagtgcttgtggctgcagcgttcaccccaagataaatttgccgggaagtatcttgcttttattattattttcacatcactctagtatatcgactttggaaacaaaagacatcattctgtttatagcattccatttttagtagtggtatttcctttaaaaaaaaatggtaattctcagctgggtgtggtggctcatgcctgtaatcctagcacttgggaaagctgaggcaggctgatcacctgaggccaggagttggagaccagcctggccaacatggtgaaatcccatctctactaaaaatacaaaaattagccaggcgtggtggtaggcacctgtaatcccagctacttgggaggccgaggccggagaattgcttgaacccgggaggcagaggttgcagtgagccgagatcgcgccattgcattccagcctggacgacagagcaagattccatctcaaaaaataaataaataaataaaatttaaaaaaaaatagtaattctcgatcgctgaaaatgtcaaatcctagagaacacagcattcctacaagtgatgttaacattgttcttgatcagttgttggctgaagattcatttgatgaatctgatttttccagaatagacgactcagatgactctgttgttttgcttagaaataactgcaggaacaatttaaaaaattttttttctttttaatttttttgttttttgagacggactctctctgttgcccaggctggagtgcagtggcacgatctcggcttactgcaacctctgcctcctgggttcaagtgattctccagtcttagcctcctgagtttagctgggattacaaggtgcctgccaccacacgtggctaattttttgtatttttagtagagacggtgtttcaccaggttgaccaggctagtctcgaacccctgacctcaaataattggcccatgtcggcttcccaaagcgctgggattacaggcgtgagccaccacgcctggccagtttttatatttaattttcacacagagcatccagtcagatttgcttcagcctcaaagagcgtgtttatgtaaaattaagtgagtgctggcagtgagctgaactttctaaaaggtaaaagggttaaatattaaactcatccaaaaacaccttcacagacacactcagaataatgtttgaccggttacctaggtgccccatagcccagtccagttgacacagaaatttttttttttttttttgagacggagtctcgctctgtcgcccaggctggagtgcagtggcgcgatcttggctcactgcaagcttcgcctcccaggttcacgccattctcctgcctcagcctcccgagtagctgggactacaggtgcccaccaccacacccggctaatttttttttttgtatttttagtagagatggggtttcaccgtggtctcaatctcctgacctcgtgatccacccgcctcagcctcccaaagtgctgggattacaggcatgagccactgcgcccggctgacacaggaaattaaccatcacagttacacagccatcgccattaatcccagcacatttcatcatccccaaaagagaccctgcccccattagccaatccccattcccaactccgggctctcagcccctagccaccgctcatctgccttcgtctctatgaattcacctgttctagatagtttgtataagtggaatcgtacagtatgtggccttggtgtctggctcctttcacttggtagaatattttcaaggctcatccacattgtagcaggtgctggtgcttcattctttttcatggccgaataatattccatcgtggatagaccacactgtgtatctcttcatctgctgatggacatttgggttgtttctgctttttggcataattctgttgtgaagaattctgcagtgagtgctggtctacaggtttttgtgtgaacatgttttcatttctcttgggtaattgcaagatcatgtggtttagccaaccagcctttaagccatgtgtctgctgagggacccaggcctggtgggggtgcattgctgtgcttggccagccaggtgctgcgagtccgtgtcgcagccatttctctgtgctgtgctctgaggttgtctcgccggcaccgggcactgtgagccccaggaggccaaagccccctttgttttatcttgagtccaggcctcgctccatgaactaggatgaatggacattgaatcaacgcagggatgggtggggctggggtggggacgcagagtgaccccgggggcctgcagctgggtcctggctgctgacttccagtttcctttgcctgttggagcccagaacaagtcagaaaggggaaatgcaaagttcgagtgtcttttctgtggtagactggcaggcctgggtgggtgagccacttgcagctagttgcagcgtgagagaggaagtgggaggggagggagagggtgagtttggtgtaactcacccctggaaggaggctgggctgaggctgggggaagtgacttttatttttctgagaggattcttccctggggccaacttcaaaccaagggagacaagaccttcctgggggaggctggaagtgctggggcccccaggtgggcaggtctcccagggccaacgtcttggggaagctataagttaccatgtttctggactgtcacacacacacacacacacacacacacacacacacacacacacacacacacacgagtaaactgtaacacaaatgtgtgcccatgaaagtgcccactttaaaccaccacacagcctgtaaagcgaaggccctggcccgcatctgggcacccactgcccagccagccggtaggcagtttgcactgtagtctgttaccatccctcagagatgcagccgaggagcccagctggcttggagggcccagtgggcgcagcctcaggaaagtggtcaggcccgggccaggccccttccccctcccagccttgggagaaattaccatatgaatgtagctccttcccggagttcgggctggaagggcctgggaggggacaggctcccaccccaggagcttccaggttccggctgctgcctgtgttagctgcgtgagcgtgagcgagccaggggtcactactgggtggaaggaagaagcgggcatttcttccaggaggtcaccgttggagtcccacagtaggtcaaccccaggccctgggtcctcgggaggaggagaaagaagagaagcaggaggtgtggagggtaggccaggaccagaaggcacacagggtcggggcagtgtgggagaccctgggggctccctcatttaaccagctaacatcacagcgttcataagaacacgctattactgcagttttattactttgctctgatttcagaaggcacaactgatgactttagggaacggagaatctgaggaaggcctcgcaggagagggtcagatgcgatcgagtaaatgtgagccgtctgtaaactgtagagtgcacgcacagcaccggtcagccctggggtcagtgttcccctggtgctcagctcggcctctgcaccttttagtgctcggctgggctctgtgggggtcagggctgggtctggtacattagaggacttctaccaagcccctggcagtgtctcagttactaaatccagtttgccagttactaaatccgctctgccggttcccgaatcactcttccgctggggccggccatgtcacgtcaggcttttcatgcaggacggcagatggatagacgctgggaccaagtcatccttgggccgcgagacgtctgaccttctgctggtgtctcagaagatgctagctctccgtggcatgtcttccacgcggtgcttggggaccagtggcctctaaggggcccccctgcctcagcgtggggagtggcctggccaaggtctcagtgtctggttggagccaggcataggctcaggtgtactggctggaggcctcctgcccatgggctctgcctgtcctgtgtccctggtccttactgtgtcttctgtgttcctgggagagaccccaggggccctgagcccagcactggggttggggagtgggcggggaagagggtggggattagggtccctggctgcagaacagccaggccccaagtccccactccactcccctcccaccgggcgcctcatcccacactgaccatttcctgaagaaaatttcctgaaccggcctcccaccccggctgtcccaggaagcccatccatccttccgccttaatgctttgtggctccagaaggatggtggaagccggaaatcatgagtctcattcacaggcggccacacaccgaagccgcggagacgccgtgggaaaggactctggccagcgcggccggcacagagggagcggtgttaccggggtagacgggaaccgtggctgcccccatgctggtctgggagagacgaggggccggacgaaaggacagcagactggccattcattcatttattcattcactcattcacagcgtcttactgggtgcttcggacgtgtaaggttttgtgggtagtgaatgcgacagaccccagacagcaatcggagggccacgtgtgtaagaactgagggacctaggctgggcgtggtgtctcaagcctgtaatctcagcactttgggaggcagaggcgggcggattacgaggtcaggagatcgagaccatcctggctaacacggtgaaaccccgtttctactaaaaatataaaaaattagccgggcgtggtggcgggcgcctgtaatcccagctactcaggaggctgaggcaggagaatggcgtgaacccgggaggcagagcttgcagtgagcccagatagtgccactgcactccagcctgggcgacagagtgagactccatctcaaaaaaaacaaaacaaaacaaaacaaaacaaaaactgaggaacccagtgtagatgagctatcccgggaaaacaagtgggagttctaggaacagcatggggaagggatggtcccggcagggaggacctctgtgggtagccttgttggaagagctgaaaggcagccagagaggctgtgcgtggatggaagctgaagagtaggttaggggcgtgtgttttgttaacaaagacttcaagcatttactgaccaggcacaacactatgtgcttcataaataaatatctcatttgatccccagcattcttatgagacagatgttattatcccatttcacatgtaagaacattgaggcacagagtggttaagttacttgctcagggtcacacagcacgtcggtggtaggcaggattctggagccacaggaatctggtatatcccaggtgcaatggaaaccagtcacggcttcatagagggaaatcatcagattagtaaattttacacacgccccctggtgctttgaggaggagggattcggacaggggcagctaatggtggtggctgtgagatgtgttgggttaacattgatgagagtttgggatggatgagtggattcggagtaatggaaatggagggcccaggcccggcccctggagatctagctgcaatagctgttggctggagaggctgttcacttagatgggggatggggtgggaggcaggtgagatgagagctccagagttcagcctggggcacggtcattgggttcaagatgccttcagatgttggggcttgacagtgacagtggctgcagatacccaggacccagcagagggcctggcacagcggggcccagggacacgtctgtgagtcaggctggcactcaagtgtgaatctggacaaagaaggtggcattgttggcattgaatgctcaggggctgggtgaagtcagctagggagaggggctctcaaggcaccaggactgactccgtgggtgagggcggaggaggagacggcagaggctgagagaatagccagagacaggaggaaggtcagcagagccatgcacagaagcctggagaagatttgaggaaaggaagggctgggtggtcgtcattccctgcagctaggaggcaagggtgacccctgtgtgtttcattcttcagaggattggtggctccatctggtcagaaccccaagtccagagatgcatctgagcttcatgccatggtgcaggcagcaggagccatggagcaggcctgcggggtcacggcctgcctgctgcttcctggtgtctctaccctgagctcaggggttgcttggatgccctgtgctgcatccccccaggcggtgttccagagaggatgaaagtggctatctcaaggtgtgaccaggtagcggtccatgcacactgctttttcctggggagagtctgggatggaagggtatgtgtgtgtttctgagactccttgaataggctccatgtacctatccacccatcttaccacccacccacccatccactcactcacccatccacgcacccacccatccacccatccactcatccacctgtcaacccatctatccactcattcacccatccactcatccacctatctacagtcattcactcatccacccatccactcatttacccatctatccatccactcatccacctgcccatccactcacccacccatccactcatccacccatccacccatctatctatgcactcatccacccatccactcatccacctatccactcattcactcattcactcatccacccatccactcattcacccatctatccatccactcatccacccatccactcattcactcatctgtccatccactcatctacccatccactcattcacccatttatccatccactcaaccatccactcatccacccatccactcatcatccgtccactcacccatctatccacccatgtatccatccactcatccacccatccactcatctgtccatccacttatccacccatctactcacccacccatccactcacccatccatctacccatcctctcatctatccatccactcatctacccatccacttatccatccatccactcatccgtccatccactcatccacgcatccactcacccatccatctacccatccactcatccacccatccacttgtctactcatccactcacccacccatccactcatccacccattcactcatctactcatccactcatccatctatccactcatccaccaattcactcatccacctatctactcatccacccatccatccagtcattcatccatttgctcattcatccgccaacccatccattcacctgcctgttcatccacctacccatccattcatccatctgtccatccatccacccacccactcacccattcacacacccatacacccatccatttatccaaccatccatccccatccttacttcagaaagcatttgaagttgctggggtgtgcacttggaaaatgcgtcataagctttcataggcctctctttggcttcctcacttctttgattggtctttctttcggacatgcaggattctgagcagctcttctgggaggtgggtgcagtccaggtaggctgcctgcaaagctaggaccgagggagccacatccaaggcactgtgggttcccaaggcgatggcactgtgggcccactgcttccagacctcctcaactcccaggctcctgagcaggaggactcctggggcagggcctggagacgggaagagaaaacaattccagtctctcaactcttgtcagtccaggtgggtgctgcatggattgggggcacctggaacagttggccccttcacccctttcccccacctttccagcccctctggctataatcagacagttgtgtgcgatgtctttctccctcctgaaggggtcatttagtcaggctcctactcatggcccaggaatgtgcccctccctgcctgtcccctacccccaagcaggccgtgcctccagccccctgctgtctctgaagggcctgggcatggggcagcctctgcagcatccccagggcccgagctgatctgcacagcagaagggaattgggggaaagctttttttctacccagcacctggcagggggccaccctgttgcaccccagagacccttgtctaagttttgttatttcagatgatttcataagttgggggaggcggagccccagcccccacagcccctgttgttgcctcactgctgagctctgctgtgtatctgctgacaggtctgctgatagcagaaggggctggagagagggaagctctgggccctgccctccccaacccctgcttaggggacatccctgataagaggaaattccagcctgtgacagatggccagtgtccacccacccacgggggaacttttctttctctttgtaagtttgcagatttgccaggaactaaaggaatctctggttgacaggccactgtggacatggctggagggctggcacgggctggatcttggggttgctttgaggtaggggccgctcctgctggaaggttccttggggtggggaaggcatcagggccattccctgaccctccctctgcagtggatccacttcagagcctgagacaaggcaagggggcagcagaaaacagaatataaaatagccccccccaccacacaccgcaccagaagtcagaggattcatccttggcctgccctccctgcagcctaagttctgagagtggctctttaggaagtgaatggtgatggtttgcaggtcagagcttgctctggcccaagattgatgtctcaataggccgcggagcctgggtgaaaaaactcaggctagggaggtggtgggttgcaaatgaaagaacagaggagggcctcttccagaaagcggcgggtggtgtgaggagcccttggaccttgtccaaatttgactttaccgactggggccaattgaaaccgtgctggcagaaaggcaaaactgcttgagattccttcctccacaatagaggagaggtttgcttgaaagggtttggcgagggaaaagctggaggaaccttggccggcagtaaaagtggggacccccgccccctgcctcgggggcgcctcggcccctgaatgaatgaaagaggaggctggatggagacagactcacaccacctgtcccttccaggtcctgcaaaggagcacacagggttcttgttggctcttccaccttgttagtcaccaagaaggagaaaacaccaacaggggaactgtaaagctgcagttttgtttaagccccatagtggaaaccggaaagagctccagctcggagaaaaatgcagctctttgcctttgcaaatccgtgtctttctctgggaggccagagccattgtgctcgatttctaagcagggtttcagagtgtctcaggaggggaaggcagagtctcagatttccggcatcccaggtcctaaccaggctttgaggagacgcttcctgtcccatacaaagtgtgaagtgtaatttgatttggagttagttaacaaattagatgagctgtgtgcattttaaaaattcagtccttgatcccccacccacacacatttgcacaatttggtcatttatattcagtgtttccatctttagaagagaacaggaagtccccagtgacatttatggagtgtttgtagtagcttgggtaggtcagtaggaacacaatgcagtgaaaagcagagttgagatgggaaaatatcctgttttcagagccccccagggatgacattccttatcgtctctgtccacccgctctggagtccactccgcaaacagcaacttgttctcacttgagagcttcctcctgccggagctcagggatggagagcagctggcctcagtcttctcctcttacctctttgtttctcagactcatcttccaccttgaataattgtttttaacctgctctccctcttctctagctgtagaacccagaactttgtgtgtgtggtcaaaagtttagagagtgctgcaggtaatgctgagataaccctattaaattctgtaagttctcatcacaccaagtttgtttgttttttttaattctcattttattttatttcattttatagggatggggtctcgctacgttgcccaggctggtcttgaactcctgggctcaaacgatcctcccgcctcggcctcccagagtgccaagttatttttttaactgggatccacgggcctagggattctttgatgaaccgttcaaaatacgtgtgtgtctgtctgtctgtcttcaatgtatacttttctagggagagtctttacttttcaccagaggtttgtggcacacacatgtcctgtactactgtatcagattgtgaattccttacatgttaaagactgcttcaaatctgtccggaagtctcggctaataaacatttaaataaatgaacttcaaattcccatgtgccaccactgttttcattctgactactctcaagcctgtagtgtcatctttttgttactgtgaagtagacactcaataaatacttgtcaaatgaatcaatgttatggtcctggtccactaggaccccaggatcatcgtctaccattattgtctatagtttctttaccatcttgttccagagcagttctttctctgaggtctgctcacctctgcacgtgtgtctagtttccagccctgtcgccttaccattctctttcctttacctgcatttcctgaactgttaatagttaacaatagcttctccctccacccactcactcatacctgaagtgagaagtcatcattgaggtctctgtggattttgtcagcccaacctggggcggcctcctggaggtggagttttcagatgagggatggacattttggtgtctgctgggtagatctacctgggagctttggcaggggccccagggcagctctgcctctttattttggctgtgggacccctggtgcactagggtttctcaagtaagcatctgtgtcctgggagagccataggcaggcctgagagggcccctggaatctgggacccccagcccggcccagtagctggtaccatcatctttcttgcaagggaagttatggaaactaagatgctaatgtgctttgataggcctggggtggctctaagccctgggaagagccctggcaactttccctggctggcgggtagaatcttctcctggcagttcagggctctgcctccagctccctgggggagagcaactgagggaggagctggaggccaaggcctcagtgctgagctgcctgcaccgcagctgcaccttctgggtcctggctgcaggaaccccatacttctccagcctttccatggttcccgaagacctggcctggggagggggtcagcagcctggggctcacctacctggcttcaaatcctggctctaccgcttactcgctttgcgaccctcataattgacaaaagccctctcggtctcggtttccttatctgtgaaatgggacaataacagtggctaccttataggattgtgtgatgatccatcagttataatagctcctgagcagcgtttagagtaacacctggggctcggtgcagtggcttatgtctataatcccagcactttgggaggccaaggtgggaggatcgcttgaggccaggagtttgaaaccagcctgaccaacattagtgagacccactctctaaaaaaaaaaattagagtaacgcctggcacagagagcccccagtaaacctcggctgctgtgatgagctttgtttcttcatttgttcattcattcaccagactttttgccggggcttgccgtgagccctacgctgctctgaagaaagccgggctggggtgagcgtgatggatgaggtgtctggcttcacaaaccctgtgtgggggggttgtggtgagaggaaaccgcacacatcattattcagttaccatcgtggggagactgtctggacgcagagagcaggctctgtgtgggagcggggagggcaagccctggttgcgaggcagggcttccccaggattcagcagggatctgaaggactttgcaggcacccagggagataggagaggaggagggagcagccctggccggacactgtcctcctagcattgcctgcatcagggactcactcagctttaagaagcccctttgtgggggacagggagcatctgttagtttataggacctgaagtgcccccatgggctcaagtttctgggaaggcctgcaggtggccgtagggctgccgcaggggtgctggccccagggtctggattcaggggagcctgcagagggagggcagctggaggctgctccagtgtgcattgttacgaggcaaagtaaggagactgctgggcccacgctgggccggggtggatggaggcaaggaagtcttcgccggggcaagggcaccagctgtagatgccggcagctttctcctggacacgggcctggaaggctgacagggtgtggtgagtgccaccggctcccctgccgtggcctggtcagtggcttcacaggcctccgtgggcaggaggaggatgaccttgcattctgcttggccaccattggcagtgacagacaaggtgtgtggggatgtggccatttcggtccgtgctctgagagccaggtgtgggttgggtttggggaagacaggggaatggcattgacttgaccctgagcactttgtcctggggtgcaggcccggctgtcactcccctggagctgggaatggcattgggcggtggctcagggtcccttgccccagcggcaccatctctgcatttggccagcaaggctgatgggacttgtgtggacatttctgggacgtagaccaggcagcatgacacacagggaggggtaggcagagaagggcggcccctgggtcttggtttccaagtcaggctttgcaagcctgctgtgtcaagccctctctcggcaccaggccaggtgggccagggtcagccctggggctgtgatgagtgtgagtgcccctaaagtgtgtcatgtccaatagctgcctcctctctgggcactgcctcccagccagatatcctacagcccccgtcccagccacagacagcaatctgattccctcatcctcggcaggtcctggggttggggtaagaatttgtcactaagtgcagatgttcccagagggtgctggctcagggctgcgtggattacagccctttcatccctgccttagacccacctgcaactctggagaaaagatggcccagtggacgcctgcggggaggagggagctggtccccaggatgagcagatttgggggcagtccccatcacgggaccggtgacctactgccaccagcgccagtgaatggcagaggggccctggcataaggcctgggttcagaatgggaacctgcagagaaactgtcaaggtctcccgccacctgacacctccgcctggctgccaccctagaaacacccttgctgcaagaagatgggggagtttgtctggggcatggtctggcgacaccaacttgagaacctcaggcctaagtgttggcctctgggcctcagctgtcctctgagctgtaaagctggctcctgggcacttgtggaaaacactggactctttattttattttactttacattctgggatacatgtgcagaacgtgcaggtttgttacataggaatacaagtgccatagtggtttgctgcacccattggactcttcaatccagctccactagaaatgactgccttctttcccttcttccgtccctccctcctcccctcccttttttccttccttccctgtttccttccccctccctccttcccttctttcccttcctctcccgtcctcatggggatataatttccatattacaccatccgccgattcagaaagcacagttgagtggcattttttcacaaccttctataagcatcacctctaattccagaacgttttcctcaccccaaaaggaaacgccatcctcggtacacagtcactccccctcccccagcccctggaaatcaccaatctgcgctttgtccctacagatgtacttattctgaacatatgactagaaccctaaaagatgtgactttttgtgcttggtttcttgcagttggaatgttttcagagttcatctgtgttggcgcacgctcgtgcctttttatggctgagaaatagtccgctgtgttgactcagcacgttgggtttctccacgcatctgttggcggatgtgttagttatttctggagccgggtgtgttgtgctactcacgggctgcactaggagctggggatatcactgagtaagccacagcctcgggcacccaggagctcgcagagcaggagctgggagggaggtcaggaggtgcatggcctgtttgccaggctggagagacttgcaaaaagtcactttgagccagaaaccagagcctgaggcctctgactcccagctgcggagccgggagggaagctctgcattttgctttgactgtggggtgacgtgtcagttactgtccaaatcagaacctttctgagagtcgacgtgggtactgctgataattagtctggatacccgaaagaatggaaagcagggacccagacagatccttgcacaaccgtgttcgtagcagggcgaggcctggaggtgcgatggggatctcaacggggcagctgccgtcttgctggagcccacggtctttggggggggtcacaggtgttaaccgcatatcatacaagcaggagtgtgaaatttcagggttgccaaattcagtgagggtcttgtgctggcctggccacttacagtggcatttcaggaaaaaaaatcactctatggacctcagtttccccattagtaaagagtaggttggactggaattctgtaccatccagtatagttgccatttatgaaatgtggctatttaaatttaaataaaaatagaaattccgttcctcagttggactagctcagtgtcaagtgctcagaagtcacttgtgaacacactgtggcaattcctcaaaaaacgaaaactagaaccaccgtagcatcccataattccacttctgggtgtggattcaaaagaatgcacagcatcttaaagagctagagatatttgtacacccacattcatagcggctctgttcacagtagccagcgggtagaaacaacccgaatgcccgcggtcaaatgaatggagaaatcaaaggcgggacaggccgggcgtggtggctcacgcctgtaatctcagcactttgggaggccgaggcgggtggatcatctgaggtcacaagttcaagaccagcctgaccagcatggagaaaccccgtctctactaaaacaaaattagccgggcatggtggcgggtgcctgtaatcccagctacttgagaggctgaggcaggagaattgcttgaacctggggaggcagaggtttcggtgagccgagatcgcgccattgcactccagcctgggcaacaagagcaaaactctgtctaaaaaaaaaaaaaaaaagggtggaacatacaaggaatttgactcagccgtaaagaggaagttaggatacctgcaacagcaagggtgaacctttcgggtattacgctaagtgaaataatttggtcacaaaaggacaatcctgtaggattccacttataccaggtccgtagagtagtcagattcagaaaaacagcagaatggaggttgccagaggcttgggggatggggctggggagttgtttaatgaggacagtttgttttacaagatgaaaaagttctggagatttgttacacaacaatgcgaatgtacttaacaccactggactgcacacttcaaaatagtgaccgtggcaaacgttatgacaattaaaaggaaaagtcacgtggccagtggctaccacgctgagcagcgcaggcctcggacggtgtcgtggtcacagacaatggagtgggtgatctttaccattgtttccagctgtctgagcaccatggtgtcctggggccaggatgaaagtgtctctgggtatgggggtctctgcttttcccacttgggagtcctgaaggcagaccccaaagctcacctggccaggtaggagagcgaggcgggctcttgcattgctctctgcgtgcgtgcctgcctgcgggccagccggggcctgcaaggccgcctctcgagggaggggttgcaggaatggctctcacctgtgcagaaggcaagccactgccctacgtcaatggcaaagatggggctcggctgcgttgtattattatttctcaagcggggcccctggtgggcaggatgtttggtttgatttgagtttctgcagtgagtgctggtgcctgtggagggacccagctgcagctgagccggcccctccctcgctctgggctccaggggcgttgggggcgagaaaggagagttcagggggcagcgcctccccccaggtcctgctggggagggttgagggatgctggggggaggtgggggcgggtaggggctggtcccagtcccaggcaaaatggctctcagacccacaggcagatggaagcgattttcggtcacgtgggtggggactgaactgctgccccgcaaggcaaggccccatgtctggcttcaggaagcggccccaaagccacatggtccatggccagatgcagggctgtgtctttgtttatttaaaggtcctggaagcccaggggagagtatttctgaagggggagcaggagcaggagcaaagccctgaaggcttccaggctgcgtggcctgggtgggggccacgtgggggcacagagagaggagccctggcctccaggtccgcctgtgggtattgctctcagcagtggagatgtgtggacccccccttggcatttcccaacaaggaattatattgttcctttgttcccccaattccataagataggaattcctgtgccctgtggaggctgagaagacggggaggtgcctgtgaggataaaccagcccccagtttctggcttccagagtcttttcctctctcacctctgatgcctcaggcctggggagcctccctccgacaccctctgaccgctccagtgaaataggccgagagggatggcttgaatcggctggggatgcaggctgcagccagggggctcagtgggcatttcctgagttcggttcttgccccgcaagtggaagggcagttgaactgaagtctcccactgcccctcctggcctggaagcctgcctcccaccttctgggcagagtgaggagtgggcgtgggccgggagggctgcctcctgtctgggagggctgctcacttgcctgtcacgggggatgagccccctgcagcctcccgtgctgtggccctggctcccacgccggctccactcccctgtggctgcccctgctgggtgcccaccggtcccagggaaaagccactcccctcccggaggactggcgggaggggccctgcctgggagcgtgccgtgtggtccctgtcttagcgcaggatgcctgaggccagatcctccctgggaggcaggatggggcaaaagtctccccgcaggcagagcagggcctggatgggcccaagcagggacgggggcacagaacagcagccgcccagcctgcgtgggagctgagggccaccaagggcagctccagcctgtggggactagcagaggcaccacctctgtgaccagcgagttgtctgcacctgcatgcgcatgcaccagtgagtgtggcgagtctgaggtgtgctgggacctggcccgtgtaccagccagccctgatgggaaccagccccatcctgggtacccctggaaccccactgtgtgggagcacctgggtcctcagcaggcgtcttccgggcgtccgcccccagccccaggcctctgacccgtgtgtggtgtcttaacagcagccaggagcagggccatcgaagggacctacagacagaagaggctttagtgatttcgggaagttcagctccacgtgccccacatacccaagagtaaaacttggtcttggcctgtgggtgtgcagcccgtgggcgctggccaggcacacaagacggccgcctgggtcagtccagggggaggcagatgtggtgcaggggcccccctcctccatgagcccaggaacagctctgcatccaggcacccgccctgcacccagcacttttccttctcccaggactgctggctcgttctatgggattgaacacacaactccatggggaccgacgctggttctatccccctttcttacaagaccatccatggggatgtgggaggcggggacacacgctggttctatccccgtttcttacaagaccatccctcctgtgtcttggctcgtggatcggcttctaaggcctttgagtggcagcaggcggtacagcttatctgagtagaggtgaaggagagggccaggtccacctgggtggcccgaggcagtgtggagggccaggagaggagagcaccctccacccttgtctgagcagccctccagggtacggagacaggagttcagggtcagccctgccttggagcgcagggggcccccagcttggcacagctcctagaagaggagatgaaaaagcctggccttgggagtctggggatggagctttgctggggaggcagcgtggctgcaggatggcagctttttagaggacaccacggccagggacatccacccgggggaattctcaggggtcgcctgggcaagtcgcttagcctttctgagcctcagtgcctcagtttccccatccaaggatgggtgtgacaaccacctggcaggcgcctgtgtgtgagcccctgttccgctctaactcctctgctgttccttccccagccactgaggcggctcccagctgcgttggcgacatggccgacacccccagagatgccgggctcaagcaggcgcctgcatcacggaacgagaaggccccggtggacttcggctacgtggggattgactccatcctggagcagatgcgccggaaggccatgaagcagggcttcgagttcaacatcatggtggtcggtgagtcctcaccttgcatgccactcaaccaatgccggaaaccagcctcagcccccagggcggcccacaagcctttgggcttggtcttcccttctgtaaaatggggcagcaaccctgacctcaaggacggattgccagtgacattgcgtgtgcatgcatgcgcctgggaggagcccacagcctccagcggctcctcagaggggcctgtcctgcacatccagggcccctgagatgactttggggagcccaggccggcctggagcaggtcctgatgagtggtcgctgcctctgagcaatgacgtcagcttgtgcagagggttctgtggcagctgtcccctcactgttgctccagcctggccctccaggctccccaccgcaccccaccgcaccccggccagaggcttcccagcagctcagcttcagctctgccctggaattggggcctcgtggcttccacaccccctggtggccccggagagctggaggtcaccacgggaggtcgtcgatcagcacgacctgggcagggtgagggggccaggctggagtctacagtgggccgcctgttgtttccaaagccccccaggtcccattcaaacctcacagggaccctgtgaagggggcgtcccgttttccaggcagaagcgaggctcagggaaggctgccaaggttccttagctcacagggcagagaaccgcagccaccgttttgactcccagaactgtgttctgcccactccacggggtccagggaggggtctggggaagtgcccccgccaggtcacaccctaaacaaaggtgagcttgcggggtttctgcaaggtgtctgggcacctctcaggccgggcctgtttctctgacctttgccagccgtgcacgtccttcctgcccagctctgtggacgcaaacccacacctgccagcccgacacctttctttcctcttctgcactgatctgggccctggctcccctggggtcttggtgtcctctctgcttcctgtagcctcatgggacccggctgctcatggccctgctgtgctcacagctgcctggaagctggcagcctgcttcaagggagggcggaggtgtggggtcccctcctacggcccccaccctgttctgcctgttgtgggggacgtgcttgtaccctgaggattcagggctgcctcccgggaagatggctggagagaaagagaggggagaggcccaaaggcagtggccaggctgggactcatctctgtgggctacggaggggctgccctgctccctagccagggacagggtgagaaggacctgggaacctctgcgtcccagccatggcacaggccttcttccggagctttggccccaaggagagggagaggcagcccagcagccctcgccttccgtggctgccactgtgacagccttgccctctgggaatggtgcgcaggaggccacttcacctgtctgggcctcttcgccctttcaaccctgagaagaacagtggtcctgattccccacaaaatcactccctcccagggatgccgagtgaggaacaagacgtggggcagctctgctctcctccctcctccctcccatggcagctgtgcccacctgcagaggtgcaggcaaggtggaggggcacctgtttggaggtccacagaccccggggagaatcccagctttgtcctaactcagcggggtgaggcttgtgtgtcttcccctgggctcctcctctgtgagccttagcttcctcgtccataaaatgggatcatcccataaagtgagatcaagcgagctaggccccgggcagggtccccaacaggttgtggttgttcgagaatttgcagcagtggtgatggtggttgtggtgatgaggatgatgggggtggtaatgacggtgatgatgatggggtgatggtgctagtggagatgatggggatgatggtgatggtggtggtgatagtggtgggatggtagtggtgatgtgggtgatggtgattgtgatggtggtggtggtggtgatggaggtgatggtgatagtgatcatgagggtgatggggatggtggtggtggtgatggtgacagtggtgggatggtagtgatgatgtgggtgatggtgatggtggtgatggtggtggtggtgattgtggtggtggtggtgatgatggtggtgatgatggtgattgtggtgatggtgatggtggtaattgtgatggtggtggtggtgatggtggtgatgatggtgattgtggtgatggtggttatgatggtggtaattgtgatggtggtggtgatggtggtgatggggatgatgatggtgattgtgatgggggtggtggtggtgattgtgatggtggtgatgtgggtggtggtggtgattgtgatggtggtgatgtgggtggtggtggtgattgtgatggtggtggtggtggttgtgatggtggtgatgtgggtggtggtggtgattgtgatggtggtgatgtgggtggtggtggtgattgtgatggtggtggcgatggtggttgtgatggtggtgatgtgggtggtggtgattgtgatggttgtgattgtgatggtggtggtggtgatggtgatgatggtggtgattgtgatggtggtgatgggagtgatgctggtgattgtggtggtgaagggggtgatggtggtgattgtgatggtggtgaagggggtgatggtggtgattgtgatggtggtgaagggggtgatggtggtgattgtggtggtggtaatggtgatggtggtaaaggggtgatggtggtgattgtggtgatgtgggtggtggtggtgatgtgggtggtggtggtgattgtgatgggggtgatgatggtaatgtgggtgatggtgattgtggtggtggtggtgatggtgatgattgtgatggtggtgaagggggtgatggtggtgattgtgatggtggtgattgtgatggtgatgtgggtgatggtggtgttgatgggggtgatgatgttagtagtggtggtgatagtgatggggatgatggtggtgttgatggtgatagtggtgggatggtagtggtgatgtggttgatgatggtgctggtgctgatgattgtgatgacagtggtggtggtgatgagggtgacggaagtggtgatgatggcgggagtgatgggatgatggtaatagcagtgatggtattgtgatgatggtgctgatggggatggtggtgatgataagggtgatgatgatggtgatgataataataaaagtaacaataataaagggatacaccttgcagtatcccagttggcatctcctagatctaaggtgtcgtggctggaacattgacataactcctgacctgaggttggccaggacacagacctggtggacagagagagatggacgaggagtgtccgtccttgggctactaaacagttcaggccagggattcccagcaccagcctctgtcctcccaggagcccacacttttcctagaaaggtgttatcaaagtcagaacatcagtgtaatttagggtgttttttgtgttgtgtttttttgagacagggtctcattgttgcccaggctggagtgcagtggcatggtcttgactcactgcagcctccacatcctgggttcaagtgattctcgtgcctcaggcatgtgccaccatacctggctaatttttgtgttttttggtagagacagggtttcaccatgttggccaagctggtctcgaactcctgacctcaagtaatccaccctcctcagcctcccaaagtgctgggattacaggcgtgagccatctcgcctggccgatttttgtttttttaaaagacagggtctctgtcactctggagtggcaatgatcctagctcactgcagcctcgcactcctgggcttgagcaattctcctacttcagcctcctgcgtagctgggactataggtgctcgccactacacctagccaatgtttacattttgatgtagagacagggtctctctgtgttgcccaggctggtcttgaactcctgggctcaagcaatcctcctgcctcagcctcccaaagtgctgggactacaggcatgagccaccacacctggcctagggtattttttttggtgtgttgctagcgtagcccaaggcagctctgtgcagggtaaagcaatggggctccgagtctggaggggtgtgtgtgtgtgtgtgtgtgtgtgtgtgtgtgtgcgcgcacgcgcgcgcgtgttatatgtgatttgtttgtgtgtgttgtgagagttgtgtgtgaggtatgtgtaagaggtatgtttgaggtgagttgtgtgtgtgttgtgagttgtgcatgtgaagtgtgtgtgttgtgaggtgtgtgtatgaggtgtatgtgagttgtgtgtgttgtgttgcatatgaatgctacttcctcatcctcgtttgtctcagtcacctgtggactggctgtctgcacacacggtcactgtccctcgagtggcaccaccctgcaggccagcgccccctagcacatggccccacagaccccatgggacatgcgtgagcctgcctgatgctcacaccagctccacgggggaaggactgtttatcccattttgcagatcaggaaactgagacacggtgaggtcaggtgacttgcccaggccctggccggtcagggaggagcagtttgaacacctgggctttggttgcaaccaccctggtgaactgcaggaatcccggccacctggtgcaccctgggcagccctgggctcctccgccagcccggcctctgtcctgtccaaaatctgagccaccaggagacctcctgtccagaaagcacaaggggcacaagagatgccgactctcccaggcccggctcacctctcaggagaggactgtggcctgggttgtgctggcatcagagcccggctgtgtgggtttacacagtcactggacacccggctcgagggtgaagtcctcgggggctgcttggcagggatattgccgggaggtagcccaggcactgctgaatctcagactggagagcctcgtgcctgggtgggaggggccccatgtgcagaccctgctggtctctccggagagacccctgaccggcctcccatcctctccccagggcagagcggcttgggtaaatccaccttaatcaacaccctcttcaaatccaaaatcagccggaagtcggtgcagcccacctcagaggagcgcatccccaagaccatcgagatcaagtccatcacgcacggtcagtggccgggagtgggctgggggtgcaggacgcccctgccttcctggagcacaggggttgggggtcaagaccatcacacacagtcagtggccaggggcgggctgggggtgcaggactcctctgccttcctggagcacagagtggggggtcaagaccatcacacacagtcagtggccgggagtgggctggggatgcaggacgcccctgccttcctggagcacaggggttgggggtcaagaccatcacacacggtcagtggctggggatgggctggggatgtgggatacccatgccttcctggagcactggtgcggtgtgagggtgcccgagtcaggcaatcccaggtccccaagacggggactcgctgtgcccaccatccccagcatgttgagcatgttggggctctggctgtgatgggtcagtgtcccggacccctgtgggccccgtcacactgagctccccacagacaactgagttttccaccaaaagtctgacaggcaaggggctcccaggggaaccgtcaccggcctgtgccggagttggctgaggaaggccattaatttcccggtgtctccttggttgtcatcgctgcctacctggggttgccccggggtcagtcaggtgtggggtgtctgtgagggtcttccgtctcccctctgactctgcgtccgtggctctgtgcagatattgaggagaaaggcgtccggatgaagctgacagtgattgacacaccagggttcggggaccacatcaacaacgagaactggtgaggcccctccagggggaggagcactagcgggggcttcagggctccctggaccccacccagagtcagccctagaggtttcccggcccgcgggggtgcagggcccacctcctgggacctgacatgctgccaaagccgcacgtctcaggggcctgaaaattctggaccaaagcagaattacctggggaatcttgctgtccccaactcatcacctgaggccagcccggggaggctggtttgggaggccgagggtaaggctgtggcatctccgctcagcaagccagacctcccagggcatgcatttcattggaaggtggggtgttgggctctgagtcctgggaatgcacgacctgcttggggagggcatctcatgtgcctgctgactcgtccccatcccccacgcagctggcagcccatcatgaagttcatcaatgaccagtacgagaaatacctgcaggaggaggtcaacatcaaccgcaagaagcgcatcccggacacccgcgtccactgctgcctctacttcatccccgccaccggccactcgtacgtccctgcagtgtcggcgtcctcatgccgggtgccctgggttccctctgtcccctgggactgcaagacggtgctgtctgccctgctgctgggtgcagaggggctgagtcaggggccatggccgccagctatgaagttgggggtgtgccatgtctgcacctccaaagcctcacactgacccctatgcaagtgtcctgcccagcccccatccttcagctgcgtcttggggagctgagggtcaggcaggccctgggctgttctggagcctggtggtctgtgtcctgccttctcaggccaggctctggcaggtggagtgggagcccccagccaagcacccgtagcggtgactgaccttctcatccgggccctgcctcatgggaccccttagagggtttggtgcgttcttagacgggaagcacagagatcagtgctggccccttccagggctggacggggctgctgttggtgttggtgagagccctttcctcccgccggctctgtccgcacctgacgtcgcccctagagatcagcaagggcgggaggctgcatgtaccctggcaggtggactcttcatggcctcacggaccctctgtcctcagctccctgtgcaccccctgccagacacctgtggctcaccctgagccagggctgggaggaggaggaccagaggccagcaggagtggctggtggaggcagccgtgggtggcttgtctgcatgggtgggtggagaaggtccttcgcacctgctgtcccagatgtacttccctgggcggaggaagcccaggggtttggggaaaccatactctgtgggcaccaggtgcaggaaggagcctggctggtgggcagcgggcctcacccagagtctgtgggaaaacccaagccggagttttcgagcccaccctctggcatcatcctctgtgggccagcaggagtcaggggcagggggccagcccgctgtccatgggcctctcctgaactgaacatctgccctcccaggcagaacggctcacctgcggtcctgtggcagctgttccagctgctccaagctttgcctcagctgaggctgatggcaggaggcagaagcctctcctgatgccagctgggcaagccgagggcgggcgggcggtctgtggcacttctgccactccccagcactgaccctttggctgggactccagctaggcatgttgcctggtcccgcccaaggcgtccagtcccatggggcaggggcgggccttggccatctctgcttaaacttctgcccggagcgggcttctccccagccatgtgtgtgaccgatttattctcactgtgggaaaagctcggctccagaactggggaagatggtgccccagttccagggccctgccagcccctgccacccacagctttccccacatcagaccccaggctcactggggccaagcaggcaaggggagcagcccgcctggtgcaggggagcagcccgcctggtgcaggggcaccgcacactggtgctagcttctatttctcttgcctctcccctcccagccaaagccccacagcaagacggctgctgagccaacgacagcccttctgtgtggacatgtaggggtgtggttgggaccccagaactcatggacgagggtgcttggagctggccctggcccgcctggcctgtgcagtggtgtcacctgtgtctgggacacacccgtgtccttcctctgccccacactcacagcgtggccgactcggcccggggccctgtccttgccagcagggacccccgtgagccccgagccagcacctgagagtgtcgacacctgcttgggggtgggtgcccccccactgccccgctcccccagatgagcctcacgcacatccctctgcttcagcctcaggcccctggacatcgagtttatgaaacgcctgagcaaggtggtcaacatcgtccctgtcatcgccaaggcggacacactcaccctggaggagagggtccacttcaaacagcgggtagggttccatctctacttgccccagcccttctgtgcaacctggagacgctgcaggcctggcaggggccaccccgtctaaaggagtcacactgtcagggagaccgaaccgctggtcactctccccagcgggtggctggcctggtggtccctggcccaggtggctgctgggggccgtccctgagatggcctctccagctcccccatatctcaaaagcagctttgtgggagtgccaattctccagcagagtctctgaggggggttttggagaagacctggaccaggcagatggtgaatctctcttccagggagtgaggccgagcaggggccgtgcgacatggcccaccttgttttatgccccccctttttttttttgagaaagggtctggctcagttgccaaggttgcaatgtagtggcacaatcatggctcactgcagcctccacctcccaggctcagtccccgagtagctggaattacagacgcacaccaccatgtctggctaatttttgtatttttagtagagacgaggttttgccatgttgcccaggctggtctctaacccttgggctcaagggatcctcctgcctcagcctcccaaagtgctggggttacaggcatgagccacctcacctcgccctgcctggtttttattagatggaagagaagctgggccaggtgtggtggctcacgcctgtaatcccagcactttgggaggccgaggcgggcagatcacttgaggtcaggagtttgaggccaacatgatgaaaccccatctctactaaaaatacaaaaatattagtcgggcatggtggcgggcgcctgtagtcccagctacttgggaggctgaggcaggagaatctcttgaacccgggaggcggaggcttcagtgagccgagattgagccactgcactccagcctgggtgacagagcgagactccatctcaaaaaaaaaaaaaaaaaaaaaagtttcaggagggatggtctctgccaccttcttctccgccaccgtctgaggcccctgctgtgggatagggaggggcatccaagcaagagggcagccctgggctcttcctcctgacagggcagcacatcagagccacatggggtgcctttcaaaatgaaaccgaggtgcctgggctgcggcaccacatctgcctcggtgggtgtgggtggggcctgtaacctactccgtcctggggccaggtgtcagggaccttcccagcatgtgcaggggaagacagtccacacaaagtgggtgtgtctgccggaggctacacacgggctgtggtctgtgcctgggcaggcgagcagccgctcactgggatgtttctgttgcacgtacccatgtcgggctgctggcagggagctgagaggttactgcaggcggggcccctgctggaactggggactgtgacgagggttttttaggaagggtttcaggaggggaggtctcggtaaccctgagtactttcttggggctgtgatgagcaggagaagagaggtgggaggtgctcaggacgatgaccttaagcccctggggagttgcagcgtcgctcaggacagcaggtgcacctgcagctgcccctcttccctccaggaggcacaggagttggaggtgattggtgtcacagccccccagagcctgcccttgaacccgagcctggggcagcacacagtgtggaggtcatgtggcaaacaccagtgggtgggtagagcttgccacagggatgggcccatctctctccctccttatcccagatcaccgcagacctgctgtccaacggcatcgacgtgtacccccagaaggaatttgatgaggactcggaggaccggctggtgaacgagaagttccgggtgagtggatccactaggatgttgttcccaggggacccccagttcctgctgaagggtgggttgggggtttggaggaccttaagccatgaaattatattcttggggccagagggcactgagcccaggtgtctgtacccagtgctgtcaggctgaggctctcgtttttgggggaccccaggctcagggcagctcctcccgggggcccaggggagggaattgccttcccgcacatgtgtaaccaataccgtctgcccgttccccaggagatgatcccatttgctgtggtgggcagtgaccacgagtaccaggtcaacggcaagaggatccttgggaggaagaccaagtggggtaccatcgaaggtactcgccgcaggcgccggggctccagacagatgggaagacagtctcttctgctgacccagagcctgtgggccacgcctgagccagggactcgtggaacctcatccactgccttgccccacccagagggaggggtctccttgtccccattcaacccttgggaaagtgagagggcaagtggcctgtgcagatgcctccaccccagacctccccccgggcagggaaagattcagggagacaggagctgggatgggggccgccaagttctggatcctggtgcaggctctttcataggcacctgtgtggccctggacaaatcgcccaacctctctgggcctagaaaaggggtgggctgtagctctgtgagccagatggaccctcggccccttaccctgctgaagttcctgggaccctcacaccttagtctcttgagtggctgttgtaaccaattagcacaaacgaggggacttaaaacaacacaaacgtattttcacagttccagaggccagaggtccgaaatcaggggctgtttccttctgaggccctgaggaccagcctcatccatgccttcctccttctggtggcgcctggcattcctagttgtattgtaaaggcatcacatgctctaatctctgccccattgtcacagggccttcttccctgtgtctctgtcccgtccctcctcttcctttttttttttttttttttttgtttgagacggagtctcgttctgtcacccaggctggagtgcagtgttgcaatctcagctcactgcaacctctgcctcctgggttcaagtaattctcctgcctcagcctcccgagtatctgggattacagtcacgtaccacccacctgacttaatttttgtatttttagtagagacaggatttcgccatgttggccaggctggtcttaaactcctgacctcaggtgatctgcccaccttgcttggcctcccaaagtgctgggattacaggaatgagccaccgagcctgccctctttccttcttgtctttggacaaggatgcctgtctttggacttagggcctaccctaagtggatgatcccatttggagatccttaatgaatctataaagaaagacgttttccaagtaaggtcacaatcatgggttccaaggcctggaccttgaccatgtctttgaatggatgggagcccctggggggccacagttcaacccactcctggcggtgacaccccgggagggatgggcccgaacgtttccttccccttcctctctctgtcccttcatttctcattagaatggaagaggggaaggtgcagagggaaatgcagcaggaaaagccactttgttctgggagagcacttggctgaaaggcccagtagagcaggaagcacaagtctcttaatcttccagggcctcagttttcatcatccacaaagtgggtgcagtgtgccaagattttagtgagttgagagactgtcccaaagaccacagagctttttgggaagctgttgctctaaaaaaatggtcataatgacaattaccaggaggcatcagacactcctgtgccactggctagacatgggttatctcgtttcatgtccgaagctccccgcacccaccctccttgcagagttgaagaggtgctgtgagcagaaaacctgccaagggacccagaacgggaggcggctctagaatctacagctccagccctgcaccagactccctcgagatgggagttcatgcctggaggagggtgtggagaggcacacgggcctttcccctgtctgcactcctcccctaccaccacccctgccgggcccaccctgcgggagctgcccagctgggtgcagcctgggtgttttccagtatccgcctgtggtgtcaggctggcttgcctccccttggcccctctgcctgcagttcctctcttcctctctgcccaaagagttcttgctgtttaggaaactttttatgaaaggcaggtttgggagagttagggatggatgggcctgggacgggccggcggctttgctatgggcgtgcctctgctgcaccctggtggccaaccttgagtaccgcaggtggccggtgacagaaactgtcaggaaatgcacaagagagaggtccccgcacctctctgacctgtgcgttgttgagcaccactggctccagctgaggaagagtctggaacctgtcaggacagttgtgaggtggtggggcccactttccagcagtcttatatgaggaccctggaaatgtgccttcagcactgctgggtttttatatcaggggccccatgagttcatagctgacctgacacccggactagtaagggctgtgccttgttcttgcctcccacttggtgaacagcatcttgaggtatctttcccatccttagaaaccaccccaagtattgtcaatagaaatgtggggtgtaattgatcacgccatgaactcatttaatcctcatgtccctgagaggcgggtgacgttattatccacattttatggatgaggaaactgagggaatgagagtaacttgcccgagccagggagtggcgatcacacactccaactccagcctgagagccccattcttcctgccggctctcgctgcccgtcagtgttagatgagagtgctgctggtcagtctgcaggaggttctagtgtggacaccgccctacacagggccgtggcaggagggcctaggcaaaggcaaccggcatagcactgagagcacttgagggctgggcaaggtggaggccccggccctgcctgctggcctaccaagtaaaaactagacatttttaacttggggaaaagccatgtggctctgcgatggggcagcctggagccaggtgtatgggttctgcatcccgctccagccttatgcactgtggagctgagacagacacagttcttgcgttctctatgcctcattttcttttcttttctttttctttttctttttttttttttttgagacgaagtttcactcttttgcccaggctggagtgccgtggcgtgatcttggctcaccacaacctccacctcctgggttccagtgattctcctgcctcagcctcctgagtagctgggattacaggcgcctggtaccaggcctggctaatttttgtatttttaacagagacgagatttcatcatgttggccaggctggtctcgaactcctgacctcgtgatccacccacctcagcctcccaaagtgctgggattgcagacgtgagccgtggtgcccagcgtctacgccccattttcgtaagataatggggataacaaaggaatcacaagagacacttgcaggtgtgtgaagacgaagttcatcacatgggagggcaccgggtgtctttatttgccttccctgcccggctccccacctccagtgatgccgttcactgccctccttgttaaaaggccttctgttatataacagttacacatgccaggcaccgcgtgttcatataggagttacgaagcacagcaataaaatgaccactctgagatggccaccagctcgagcccgagggcacttgtgggtgcccgtggtctcctgcccagtctccctgagaagtggccactgtcccgagcttgggcttgtatgtattgtgtgaagtgcacatgtccctgagcaatgtttagcattgctgattcttgagcttgtgaatggtcgtccacagtacgtagcccctgtgtgtgtccctgtgtgtgtgtgctctgagcgcacacaaggtggatggggccgtgggggtaacaccctgtgggccacaggttttctttaaaatcccagctccgattcctgcttcatcccattcccagcagcccagccccctgcctgtcttcaggcccctgctgggacgtcctgctctccctggtcaccccagtggtgcgggggcccactgccctggcttctccactgtggcttccttccatgctcctatttggcctggtcactgtgccatctcccattagccaggaactttctggagagcaggagctgagctgtccaggagcaggagctggtgctggtcactccagtatcccccagactgagggcagtgccaggtgtcctatactcagctgcagagcaggtggttcccctgccctcctgcccatggggctgccctcagactctgcttttggcaccagcatttctgggcagggggagagaggtggggtccgggcagagtttctccactgggacattaaagcccctcctgtctcctctcctagttgaaaacaccacacactgtgagtttgcctacctgcgggaccttctcatcaggtgagagacagggtgcttgggtggggctgacggcttcacccctaagagggccctacagcgggtgggggcagtgggtgtggggccgaagccctgggcagagtgggtgccccctgccacctgcctgccctgccctcgggaagatcttggaagcccatcttctgaaaaagaaaacccactgggaaatgaagcaggcagtgaagatccttttcaacccctgcgaagttggctggatgggaaggctgagctttgatccactgtggtctggcccgttagagctgcccggtggccactaagggcccagtgaggcctcatgtgcaggccctgccggcagcgtggggcgtctccagctccgatcccactggcctctgacccctacccctttcacctggctgaggcttctccttgtttcccttgagtccaggcaaggaggggaagccctgatggagagggtgctgggtgggtggtccctggagtgtgggccctggcctgggcaggttcttcctcagcaagcagctggcatggatgatgggaatgttatcaagaggaggggcctccaggttggcgggggcaggggtggggggattccgggagccgttctgccattgtggggatactgggctttccaacctccctccagattattcctcctgagctgcagaggaatgaaaatccgagcccaggacttttttttcctggggacaagggcaacccagccctttgccccaggccacctgcctgccacaggccatagtcctggaggccggtggtcacccactgcttccaccctgccagcaccctggacaccggcctggagcaacaatgctccagccctgtccctctgagtctatgcactgtccctgggccctggacccagggccatagggtggacccagagggagacacatgcactggaatatgtgtgttctgaccgagtctgggcttaccagggggactgacccttcccccaaaacgtgtaccagatctggtccaacatggtgggcctgggggaccccatggggagccaagcagtcgggatggggagtgggggtgggggcaggcgggcctgagtccgaggcaggccgagcagggcccctgccccgctgcccccaccccgctgcgcccacctcactgacccgcccgccccccacccccacaggacgcacatgcagaacatcaaggacatcaccagcagcatccacttcgaggcgtaccgtgtgaagcgcctcaacgagggcagcagcgccatggccaacggcatggaggagaaggagccagaagccccggagatgtagacgccaccctgcccacccccgggatcctgcccccaagtcatttccgtccccccccaggccctcccaccaccccattttattttatatgattttctccatttgtcatcgttccccaccccttcgacatgctgccaggaaacaagggaaggggcctccctccgagtgagtcagtgatgaggccgcggcctccccgaggttgtggggaggctgcactggagccacaggcaggggtgagagcacccactgaattgacatgaccctctgtccccaggcctggctccccgagggctcagaagagcagcttcggtgtgcagatcatccgtctgtgtggggttctcagtgccggaggccttggggtgggggccaggcctcgcacttgcagaggagcccagtgggctgcacgctcccctccatccccatcggccctgtcccctggagtgtgtcagagcccaggggagaatgcagcccaccaggagcacctggaccccctgcccgccacatggtgtggccatcactcagcccctacccctgccctgctcctaagggtagaaaactccagggtcccctgccaccgactgcccagccactccaagccccctggcagctgcccctcctggagcagaaagtgcctttatctcagccatccgcagactgcttggccagatgcggggacaggctggaatgagggaggcgtcttcatctccctgccatccccctctcacgccacccccgcccccaccgggctgcaggtgctgctgatgcgctgggatctgattgaggataaaaaggaaggagagatgacccctaccccctcatcccccagttttgaaaaggtctaagcaagtgagtctggtggaggagctgagggagggagccatggaaggtgccagaaggaaggttggcgggggcacgtgtgggccgtggcttgggctggtcagagtggcgtgagctgcccggcgcctgccctgcccaagtgaccagggaagtgtgtgtgtgtccatgtgtatgcgtgtccgtctgtctgtctagtgtctgggtttggcccaagactgggctgtagttacattaatgcccagccagccacccctgccactcacccttcctggcccaggccttgctgactctctgagctggggaggtgggaggccaggcgagcctgactctgttgatctacccgtgcctgggcccctcccctcagagcccatggtaacgaacccctagaaaggagagaacgggcgtcaggggtgcacagtccacagctgaagagcaaggtttcgtggcagcacggcccggcccctcaccctctgtccccacgaggggacccatgggggctgtctttgcagggcacagatgaccaaagtcccttcctgcttcctgttacctgtcttgctcctggggagaaagaggggcctgatgagactccactcaggtgcacacatcaccaggtgcatctgcaggcaccgggctggctgcttgcagccaggagaaggtcagcgagaaggagtgtatgagtgtgagtgtgtgtgcatggaagttggggcactgggcgtctgactccctccccacccaagagaggaaggacccctcaccacccccactggtgagacagtttactttgccaacttgccatgtttttgccaaaaccaagattttgaaggaaatgagtggccagcgccagggcccaggccatgtggcctgcccagcctcaatgtcacttggtggcggggtggggtgggggtgggcagcagcatcccagccttgagatgcttcactttccttctctgtaaccagactttgaaaaattgttcgtttcatcaggctctgttcctcaatggccttttgctacgtgcctcccgagaaatttgtctttttgtataaatgacaaagtgttgaaaatgtatttcctgaaataaatgtttcaaatgcagaaaccca

SEQ ID NO: 3 - DNA, 52626 bp, Artificial Sequence
  chemically treated genomic DNA (Homo sapiens)
ggaggaaggagaaggagtttattgtaaataataataattaaatagtttgggttgggttagtaaagggtgttttgggagtgttcggttatttttgtattttattttgttttatgtttgggtttttatattttttttttattcgtgtttttttttttttaaaaaagatgtaagtgtaataatttattttaaaaggtaagaacgttttttttaatattttgttataatgtagttatatggtggtataggtagtaaaattttatggaatcgattttatttttttttttatatttttttggatttttattgtatttttaatatatatttttaatattttattttaggttattaagttaaaggaaaagttgtatttatatagggttaaaatattttataatgagaataataagtaacggttgaggtttatgttttttttagtatttagttttttttttttaattattgtatatttaaatagatgattagatattgaaaattgttttttaaaattagtagtataaaggtttagttttatgtgtgtgagtgaagagggaagaaaggagaggtcgaggttaggttatggaagtattttttttttttatagtattttgaaagaagtgaagtggggttgatgggttattgttatttttttattttttaattggatagttatagagtattattttgggggttagtttattaattatttttttttagttaggtttgtttgtttttgtattggatagtaagggttatgaaatagattaggaattttcgcgtgttttttaggttttcgaagatggttttttattgtttagtttagggagggaatgattgtataagtagggtacgtagtttttatggaagcgtttttcgtttgtttagtcgaaatgataggagatggggtacggagttgggtttagtgtgattatagttgtgtgtgttggggatttattttatatttgttgtatttattttatcgtagtgtttttgagttaatttggttatcgtgtttttcgaagttggaggtacggtagtgagcgttgagaattaagtatagttaaaagaatttaaggaaagttttaaaagtttatgttttttaagtgttattttagttttggagataagtttttttgtgtgttttttagagttttcgtttttatgttttaggagtagtgttggtatttggagggtagtagtagtattttagtgttaagttttgttatgttgagatttgtgtttagtagggattggaggttgttagtgtggggaggttgtttatttatttgtcggttatttacgattttatttttaagttgttatttttgttgagattttaggtaggtatttaaaggaaatttttattttttttagtttattcgtatagtaatgaattacgtggtaggtagatgtttttttttatttgtttttatgagttttagttttagatggttttgggtagttgttttgatttgtttagttattttaggagttgatacggtagtggttttttgttttgtagtgtagaaggttgggtttagttatttgttttggaagggattgggttttaaggtttttttttggagaattgagttgttgagtgaatgtttatgaggtattggagaggggagttttatgtagtatcggtcgtttttggtgttaacgaagtttaggtttttatattttgggtggtacgttttaggttttttttttagtttagttttagggtaagtataggttagggtagttatgtttttattttgggttagggttttttttgttgtgaagggattggattaattagagggtttttaagtttttttttaattcggtggttttattatatttagtgtggttaggtggtttttaagggttgggttaagttatagaggataggtttggggtacgtggttgtttttgacgagatgaataggaatgttttatattggtatgtttaattttagatattttttgggtgtgttgggataggtagttatagttatagagttttttaatagacgttttttttttttaagtttttgggttgaaatttgtttgatttgggtttagtttagttagagagtagacgtatggaggaattgagtgtcgggggttattgcggaagagtttttttaaagtttttattttttttttttgtttgttttggagttatttgtttgtttttttttttgttttgatttttttgtttttttttttggtttattttggagttatttggttttttttttttttgttttgatttttttatgggtgagaaagatttaaggtgaaagttttttttttttttatttttttttagttatgagtattttagaaggaaaggggggagaaatggggaaattgtttttagttttaagttttttttttttttggttagattttgggggagtttgggttattttagcgaattttagaattagaaaaaattttttaaaagttattttaaatttttaaatatttgaaatatttaaagttaagtttttaagaatatttaatttaatgtttaagatttttttatttttataagatttattttagagttacggtttataaagaggtttgatttattaagggaggttatagttagatttttttttagtttggtttttagagtagatgagaatattaggtaggcgggagattgttatttttaattttagagatttttatttaataatattaagtttatttttcgtttaatttaggaggtttttttgtgtttacgattttgagtatagtgggtttggttttattttatgataggaattaagggagaaggtagaaaaggcgagcgttttaatgcggggcgttgtttgttggagggattttttatttggggtttgataggtttgtttttggacggttattgtgtatttttagttgaggtgagggttggggtttagggttagatttaagttataggggtcgggtaggtaggtatagagtttcgttttttggaggtaggaagtttggttttaggagggtattttgatagttttatttgtaatagtaaagttatatcgaggagtttaggttaggagttttttcgtaggttggagagagggtagagagttttggtttttgtggaagaagtgtaaggacggagtgtggaaagttgtgtggagaagagtaatattttttagtgtttggagggatatagagtttttatttgtcgtggaaggttttgggtagcgatgatattgatagatatggtagggaggatagttagtttgaggttatagtagggtttggaggtcgagtatggttatacgttttttagtaaagtttgtacgtagtttttgattttttgttattcggtttttaagttttagtttatgtgtttcgaagttgtgagtttttttatgtcgggatattgttgagtagttttagggaggggttagggtagggtagggaagagacgagttttttcgtatttttttggagggaatttgattgggttttggatggagaataaagttgtttagattttttcgttgtattagatgttaggtaggtcggagagcgggaggattgttcgggtttacgttttattcggatgttttttttttttttaggattttttttttttttagtattatgggagtttttgtggtatttgtgtttttagttttttttaggtttggttttttttttatagtgtttagtgaggggttggttcgtgttttttttggggattggtattgttagatggtagtaggggttttcggttttagtttttgttattttttgtttattttttttaggtgtatttagtttaggggatagttaggatgtagttagttaggttttgttagattcgttattgttcggggggaggtggaggttggcgttttggttttagtaggtcggatttcgtgtgtttttagggagagaaagatgggagggtaggaggttggttttgtagggtagtttgtgttttagatatatagttatcggtttggtgattaggggattttattaggagcgggaaggatggataagattgggttggtgaggttgttgggtttgtatggaaatttagtattgatttatggttaattaggtagagtagaggagtgggcgggagtaagaaagcgtttttagtttattatggatgcgaagttgaaaaacgtggttatttggttttttttattgtttgtggtcgggagtaggggttagggttttagtgttagggaggggttaggggtttgttgtttttttttttttagtagtttacggggttttagatttggggcggttgaaagtgttgagggttaggtttttggtttaggttaggtttttaagaggaaagtcgagtgggaggttgggggtttggaaaatatgggcgtggtttatggtgtttcgaggtggggacggggtaggggtgttttgttatgtggtttaggaaatggtcgtattgtgttttttggtttttatgcggagggtcgcgatgttcgaggttttgcggttcggttcgtcgttgagttcgtagttattgaggtttgggttgaggttggttgttttaaataggttgtttatgtgcgtttggtttacgtgattgttagttttagatatatttaggaagtcggtgacgttgttggttttagagttaggggggtgggtatgaggggatatgtaggtaggtatcgggtcgtaggggattacgtaggttggtattggtgaggtagtttcgttgttgtcgagttaggacgggttttgaatttgggagaggaagggagagatgttatcggttggcgggtaggtgtggtgtggaaggggttcgtttttttttttagagtatttttttttttattgtttattttttttatgaagttttttttgagtgtttagttttgatggatatttagatatttttgtgggggtggtttttatattttggtatttttgtttttagggttaggttagtagtagagggaaatttagttttaaagagtgattttaggttttattaagggtttagtggaagggtgatattttagtattttttagttggttttttatttttagatttaattgtagatttggtttttatttgcggatggtagttgtgttttatttatttttagtttttttttaggttttttatatttataggtatttgagtaaggtgagtagattttaattcggagagttttggtttcgtaggtttttttgggtttttattagtagtagggaagatggaggggttgggtgaggtgggcggtagggatttaaattttttagaaattaagggttagtggttgaggttttagggtttgaattaggaggttttagaattaatttaggatggaaggggttgttttaggagtggatagttagatttgagatcggattttttcgtgttaaaggggcgagggtatgtgtagggatgagttggttattttattttttatttgtgttattgggttttttttttttttttaacgtttatttggggtttttatttttttttattttttaggtacgtataaggaggtagaattagggtgtgggggagattcgggaattttttagtttatgtatacgggatttttggtaattttatgtgggtttttgttggtttgtttttttgtatgtgtttggagtatattcgagggaggtattttaaagtagggagaaagagtttagtttttattttggagggaatcgtatttttttttgcggtgtaggggaagggggatcggttggtttttattatttttttttagaagaggtttgagtatatattatgtggtgttgtaggtgaggtgggggtaggaggggtgaatagggttttgtgttgggttttttttttagttgtgcgtttaggtagtagagtttaaagttaaggagggagttagagttttattttgggaggatagagggaggttgagtttagggagggagaggggagaaagagaatggaagaatatagtgcgagttgatgttgatggtgtttgtgtgagatattttatattttttagttttatttttaggtttgtgttttgtttttttgttttatgaattttgggttgggggagagggaatagagggttggtttggttggagagttagagattatttgttagtatagaattaggttagggagaagtaaaggaggtaggggcgttcgtgttattggttggttgttgagtagggttaggttgggagttgaggtggaggttatgttagaatgaggtttgagtaggtagggagtagtcgtttttgttgggtaggttgagtgggggttaggagaggatttggatttggttaaaaatatatttttttaagtattttatgtgtttgatgtgatttaatattttttattttttgtattttatattagaataggggattggttgatagatatttagggaaaatgttttggggggaggggaggatagggttttagaagttgagtataggtatataagttttttgaaattgtataatttataaaatatttttgtatgattgaatttagattttataattgtttgataatagagttgagtagatgtttttattatgtttaaggtataggtgaagaaattgaggtttagagatttgagatttgtttaaagtgagaaagatttggagttggaaagataatttaagttttcggatttagaattttaagtttattttaatttggttacgagttttggagattttagagttcgttttttgaagagatttttcgagcggtatttgagggtttggtggttttttgtttgttttggtttcgatgtttatagtaaaagtggttaaagttagtggaggaaagagtcgtttttattgttttaatttttttttttttaaagtttagttaagtttggtttaatgattagttggatagattaattttgggttttttatattttggtataaataggtatatttttggaatgagacggaagggtagtttggagttataagttatttcggggtgtttgggtttttttttaaggggtttatttttagagtattaggggttggggatcggtggcggtagtttagggcgggatttatttgggcgtagtttttagttcgggtgaggaggggtagtttatatgtagtggagaagtgggttcgaatttgttgtatttgtttaaaacgttttcgttttttttatttggtttttcggttttggaattagatttataagacgcgaaaaagttattgttattagggtgagatgttcgtttggaggttttatttttaggtagtgtaaattgtttttttgagttttttattagttgtagtgcgtttgggaaacggtgcggttatatataaatattaattttggtttttgtttttaagagttgataatttagaattatttattttgagttgggaaggtattttatttttattagttatgggcgtgattttgagttagaatttttatttttttaagtttgagaatttagagtagttaagtgttattatttataaaataagttattggttattttagtagttatttaagtagatttttgtggagaagttgataaaagttataaatgtttttttagatgtgtttttttagataattatatatagttttgttatagttttttaaaaggtttatggttttttaaggtttattggtttagatttataatgtttttttttttgtattttgtttgtagtttttttgttggagatagttttttagtttagaatttttttgtgttaaagggagaataggggttttgttgggtaatagaggtagttagggaagattttttggaggagggataggagttgggttttgaatggttggttgaaaggaggaaagttaaggtttaggtttagaaatagtaaggtatattttaaaaatttaaagaggttaatttgaaggaagcggtgggagagaaagaaatagagttagatcgtagggggttttgattgttaagtgaagggttttttttttggtgttgtttgtagaggtagttgttataaaattttgtgtagaagcgtggtttgatggtgagaggaagtggaggttaattcgttattgagtataagtggatgggatgttggtttgattgggagtttaacgggggaggggaggtttttgagttagttgtgagtattggggtttttggtgacggggagtattgggttttttttttttgtacgagtatttttggaaggttgagaatttttttaaggtttaagagtaagagttgttttatttttggtttatgatttaggatttggagaaggggtgatggggacggggtgggtgagagagggagagtgaggagggattagtttttaggttaggaatggttttaggttgatttagagatggatcgtggtgttttttagagggaggtttttgttagtttgatgtgtatttgtttgttggttttgtagatttagatgtaagtgggtatattttagatagtacgttgtagatcgggagaatagagttatgataatagttttagttgtagagttataaggagttttgttaggtttttttaggtttaggtattaagaaagttaatttttttgaggtttagtttttgttttttaggtggaaatatttttttatttattacgattaatgtagttgttgagttaaatataggagttagtttttaaaatttttttgttttagagtttttgagttttttaggaattattgcgaggaggggagaaggaggtgtggacgtgtttttttatagacgttgtttggtttttttgggtatttagtgtagttggttaatggataggtttataggagtattggtattgttaagggttttagtttttgtatggcgaatggtattttatagtcgtagtaggggagatagatgggaaatgtagtttaagaatgtttagagtattttttatttgtttttttatagtttttgattttttttattgttttttgttagaggaaagaggttaaggaagatggggatgtattttatgttattgtgaggagggtgggggtgagtaggggtgtatattattatgtttttttatttttgtattaatttatttttttttttttaattttaagtatgtgtgtgcgtgtacgagtgtatttattagtgtggttatacgtacgtgtatgtgtgtatatatattgattgggggaggagaagttttttttttagaaacggattttttttttagtttggggttttagtttttgttttggttttttagggtttttttttttttagggatttttagggtttaggttttggttgtttattgggagttaaggatagatggggttttttttttgtgttgttgaaatgggatttttttttattagtggtttgggatgggagattggggttaggatgagagaatgaattagaggagtttgtttttattttatgtttaattttttgtaggtttagtttcgttttttcgttttttttttagttttttagggttttttgtgggggaagttggggggaggggagaagttattggaggtacggagagagatggtttttttttttttttttgttattgtgattgttggggttttttttgtgtttttgtgggttttaggtttttatggtgggattgtggaagtggaagatgtttttataggttttggaatagaggatttagggatgggcggggagggatttcgaagagggaaggaggtggttagcgtttggtaaaggggtttagagtggagggaggagttatgtgggggagtggaatgtggggcgcgggttcgttggagttgagtgtgagggaggaggagatgtgggttatttggggaagatagatgattaggcgggggagaggttagtagagttagtatcgtttttggaataggagtggaagaaggttaggttgagggatttatttgagggttgaagatggaaatggtgagaggcgggtgagcgatcggtgggagtagggttgtttattttttttttttttttttttttgtttttttgttttggggttttattttgcgtatttagttttggtttttttgtttagatttagatatgagttaggtgagtttggtcggtttttaatattttttttagtaaattggaggtagtaagggtatttttacgattttttttatgtttatatttgtaggttttgaggtttggagtgtttatttatttttgatttttggcgttttaggggtttcgagagtttttttttagatgttatattaatttttacgttcgtttttgtgttttttagttttgtatcgtaggtttgtttttattgtgtagttttaggaggatagttaattacgaggtttttattgttttttcggtttgaatgttatattttaggattattttagtttgggtttatttagtataggtttttttcgaggatcgggttgtgtaaggaattaattgttttggcggaggtttcgttaatcgtagtttatttggggttagggcggggtggtttagggcggggaggtttttgttttattgtttttagatattagttgtagagattggaattttagatagtagagagaggtttttgtagttttttggagtagggttaaattttaggtttttttttaggaaaagtttattttggggtttttattgtttcgtttttgtttttattattattttacgttaggtatttggtttgttattagttgagtatgggttttgaataaatatagtagaggtaggtagggggttttattattatttttttatttttttagggtattgttaggtttagggtttaatttagaggtttgacgtatatgaagattttatttattttgttgtttttatataaagaaaagtttttgaataatttggtatgtgtttttgtatagtaaattaaagttaaagaagtattaggttgcgatttaggagtttcggattttagtcgtagtgttgttattgagtggttgttgttaattttaggttatgattttttatttatgggttttttttttttcgtttattaaatgggaagatggggtgattatttttagtattatcgttttatagttttgtggtttttttattaggtgataagatatgtagtacgttagagtttttttttttgttttggttgttaggaagttttaagttgaagtttgtgtttaatggtaattatgaattttagtttaaatttttttttattatattatttttgtattttatgttattgtttttgtttttagattgaataaataaatttttaattgtaagttattttaattttattttggaagtaggtataagtgtgtgtgtgtgcgcgcgtatgtgtgtgtgtagagaatattttgttttagttgtatggtggtaattgaaaaatgttttgtgcgtttttgtttttatgttttgtatttaaggcgttattttttttttagtatttagtgaattttattttcgggtatttttatatatttgttaggaagtatgtatgtaatttatatatgtaaatataaatgtatatatatattgtatagaaaaggaataggtttattttatattaatatagtatttatagggttgttttataattagttatgtttttttttttatttatatttgtgggttttttttaatttatttgttggagattaggttagatgttaggatttttgtttaaatttaggtatgtaaggttatgtgagtggttggttgtttaaatttaagtgagatttgggtgtgtgagggtttttggatttataggaaagttttagttgttttgttattttttattaaatatttattaggtattggaggggaataaaatggtagttttgttaggtgtagtggtttatgtttgtaattttagtattttgggaggttgaggtggtggattatttgaggttaggagttgaagattagttaattaatatggtgaaattttatttttattaaatatataaaaattagtcgggtgtggtggtgtatatttgtaattttagttatttaggaggttgaggtaggagaatcgtttgaattcgggaggtagaggttgtagtgagttaagattgtattattgtattttagtttgggcgatagaataagattttgtttaaaaaaaaaaaaggtagtttgggttgggtatggtggtttacgtttgtaattttagtattttgggagattaaagtaggtgtattatttgaggttatgagtttaagattaatttggttaatatggtgaaatttttatttttattaaaaaataaaaaaaattagttgggtgtagtggtgtatgtttgtagttatagttatttgggaggttgaggtatgagaatcgtttgaatttaggaggtggaggtcgtagtgagttaagattatattattgtattttaatttgggtgatatagtgagattttgttttaaaaaataaaaaaataaaaaaaaaatggtaggttgtttttagggaatttatagtaatttaatcgtgtagttttttagtattatttttggtagttgtagtttttgaatagttatatatttattgataattattagtttttttttatattagttattttggaaaaaaagtttgtagattttattagagatgtttttgtttttttaaatagaaaatggttgtaattgatgaattttttattgatgttttagaataatgttgttgaagatgtttttatgagttaatttaagagtttttggggtttgttgaggattgtagggttggggtatttttgttttaatattgaagggtttagtttattgagttgtatggcgttttgttgattaaaaaaaaaaaaaaaaaaaagatttttttttgttttgaagttattgatttttttggtttattggagagggaaaaattgttatgtggtaacgttttatttgttatttttaatatgttttgggttggaaaagcggattgattatgatatttattttgtgttaaattgaaatttaaatttgagtgtgtgaattttgttatttgtattttggttatttatgggttttttttttttttttgattttttttttgttgtgaatttatgttggtcggggtagatatagttttttggataagggttgattgatttacggatatttattttttagatttgatgttttgcgtttggttttttttaattggtgggaatatagtgatgaataattagtgtttgattttaaggaaattatagtttagtaggaggggataaataagtaaaataacgtaagttagttaataattttgtaaagaagataaaataggagttgggtatagtgttttatgtttataattttagtagtatgggaggttgaggtgagggattatttgaggttaggagtttgagattaatatggataataaagtaagattttatttttataaaaaataaaaaaatttattttaggcgtggtggtgtatgtttgtggttttagttatttaggaaattgaggcgggaggatttattgagtttacgaagttaaggttatagtgagttatgattatattattgtattttacgttgggtgatagagagagatttagtttttttaaaaaaaataaataaaaatatttaaaagataaaatgggtttaggtatggtggtttatgtttataattttagtattttgggaggttgaggtgggatgattattttagtttaggagtttgaggttgtagtgagttataattattttattgtattttagtttgggtgatagaatgagattttgtttttaaaaagaaaataaaaaaaatttaaaaaatttttaagaagataaaataggatagtgtaataaaaggtgagttggtttgtttttgttgtgttgggttgggttgagttttattgggttgtgttgagtgggttgagtgtgttaggttttattgtgttgtgttgtgttaggttgagttttgttggaatgtgttatattgggttgtgttgtgttggaaggggttgtattaggtttagtatgttgagttttattgtgttgtgttgggttgagttgagttttattgggttgtgttgtgttgggttgggttgagttttattcggttgtattgagttgagttgagtgtgttaggttttattgtgttgtgttgtgttaggttgagttttattggaatgtgttatattgggttgtgttgtgttggaatgggttgagttgggttgagtgtgtttagttttattgtgttgtgttgggttgagttgagttttattgggttgtgttgtgttgggttgtattgagttgggttgagtgtgttgagttttattgtgttgtgttgtgttgagttgagttttattgggttgtgttttgttgggttgtaatgagttgggttgagtgttgggttttattgtattgtattgggttgggtgttttggttgttggttggtaataggggggttattgttttagttatagtggttaggaagattttttagaggaggtatgagttgggatttgaaaaatggagggggatgtagttatttaggtagaaggaagagttaaattgttttttgtttttgtttattgggatgttgtggatattgtttttatgtttgttttgttttttgtttaagagataggttttttagagtagggataagtaatttttttttgtgtgaaagagttaggatttttatattgtgtaaagtttagaaatagttagtagtagtttttttgtttttttgttggaggtttttttttttttgtaattttttattatagtgtagaagtttaatattaaagaggataaaagtagagtcgttttagttgggataggggtatgaggggtaggttaggagtttttatttttaggtttttaatgaattgaggaaaggaaagttatggtgtggttggtgggtagttaggagattttaattgtagttaagagtttagggataggttttgttttattagttttatttttaggtggtttttattgatttgtacgcgggttttagtgaggtttgtttttatggttagttgttttcgcgtatatacgtttgggtagtgggttttttggaagattttttttagtttttttagttggtagttggtgaaggtggttcggtttcgtcgttttttgtttttgttgttttttgagtcggttttttttaatgggttggggaggtttgagttggttcggttttggggtttttttattttagtttttttgatatttaggtagttgttgtttatttttatagtgttagagttagggggtaattttggtttatttagggagttttttttagttgagggaggaggaaataaagttagaaattaatggttgaattaaataagagaaggggaatgttagggggagagtggggtattcgggtagttattttttgtttttttttttttagagtttattggatgcgaggttcggagatttggtttttaattttggtttgttattaatttgttgtgtgattttgggtaaattttttttttaatttgagtttttttattattattttagattaggttttttttagtaataatgttatgtgaatttaaggtagttaatttgatttttgtgatttttaatttttattttattgattttgagtttttttttttagagggattttttgtattaggatttttttggggttcgagaattttgattttagtgttatggtttttttgggtggaagggaaatttatttagtagttatgtttggtttagtggggtttggggtgaggaggatttaggattgaggtagataggagtgtttttttttttttggtttagttttattaggagtttagtaggagttgtggagattttgttttaagagtttagtgttgaggagttaatatttttttttttgttttttaattttgtatattggttttatttattgtttaagagaagggttttttttttttgggggtgtatgggattgaggtatgggttatattttttgttataagtagtttttgtttattgtttattgaggttgttcgggtatttttatttttagtacgttgatttcgggtttgggtgggtgtatatgagtatagtttttagttattgcgtttggtagatggattttttatttatcggtatatttttagtttaggattgtaaggacgagttaatttatatatattaagaaagaagaggtggaggttggggtgggagagtgaggtaagaagttattttattattatatagtttggtgagttttttaggtagatatatttattttttggtagagggtttgggataatagtttttatttttttggtattagggattggttttgtggaagataattttttttatgggtggagaaggttgtggtggggtatggtttggggatgaaattgttttattttaaattattaggtattagatttttttaaggagtacgtaatttagattttttatatgtatggtttatagtaggatttacgtttttgtgagaatttaatggtatcgttgatttgataggagttagaatttgtagtaatgtttgtttatttgtcgtttattttttgtgtgcggttcggttattaataggttatggatcggtattggtttatagtttgggggttaaggatttttggtttaggttatggatttttgatagtttcgttatgaattttatggttatgattttttagttgtgtgtttaggagagtttatttattcgttatgtgttttagtttttttttttataaaatggggatgaagatatttttaggattttttttatagggtagttgtgggaaataaagaggttagtgtgttagttatgtagttttgttattattgatatttatatttttagtttggatttgtaaatttatagattttgtgaatattagaggatttcgattttggagaagttttttaagtatgtaggtttttgggtataggagtatgtgtagggcgtgtatagatgtttagggaagggtagttaattgggtgtttgtagatgtgggtgtgaatttttcgagaattgtattttttgtttgtaatttggggaaaaggaatttgttgagtgaaagaataaatataattaataagacgtttggggagtatttgatacgattttttacgtgtacgagttttgattattataataagtacgtgtggtaggtgtgagtattagttattttgattcgcggtttttttttttggaaataggtttaagcgatgggtattaagtgttagaatgatgtttttagtttaggttttttgattttatttagattttgagggttgaagttttagattcgttttatttttggttttttgtgtatattggggaagttgagagggatatttggtttgtggtattttcgtttttttttttaaggtattaaggaaagggtatagaggtgagtgtttagagtaggtttgaaagtagttttaggaggttgtttttgagggttattggtagtgtagacgttatgggggtgtacgatcggtttagcggtattacgtatgatatttgtgtgagtttaggtatatgtagatagttatggttttagtgataatattttgtaaattgtagttggtagttgggttaagagtttttagtaaagatatttatttttttggtagataaatatattttatgttttaggttttttttttttttttttagaaattttatttagttttataaaaataattatttttgttttgtaattttttggaagttagatgaggggttgagggaggtgagtattgagttttgagttttgatttttaggttttattttatagttttatagacgtttgttggggattgggattattttgtatagtaatgggagttttatgttataggaattgagagttggtatggattagtttgaatttttagttttaattggggggaaattgaggttagagagagaagggaatatgttttaatttcggatagagtatagttttttagtttttggtttgttttttatttttttttttgcggttttaggttttatttttagggagagaggtaggggtagaaggaatttaggggttttatatgattaaggcgttttgttttgtttattttgtggggggtaggattagtttttgaggatgagggagtgaggatgcggtttgggggtagttttttagtattgagttagtttttggttttttaggggaagtggtagaaggtttagtttttatggtgataagtaagggtttagttttgtttatttttagttgtttattgagattaagtgagtaggtagagatagaggtggtatagggtgtgcgaagattattaggttaagagttgggagttttggtttcggttttcgttttttttaggattttagatgatttattttatttttggagttttatttataaatagggagagcggggtagttgagggtttttttttttttgtttattagtagttaggattgtttttgaggatttggggaggggaggagagggggagggtgtgtttgtgttagagatggaaggaatttaggggagcgttgtttttggttttttaaggaagaaggaagtaagttttttaatttgttttgagttagtttgttttaaattttgaggttgggttttttatttagataataaagaaaaattttttgaagttttgtagttttatttaattggttagaataataagtatagtttttttagagtttgagttttaagattttaagtttaggttgtttatgtttatttttcgttattttgtagtatttttatttggcgttggttttagtttagggtagtagggagtttattgtttttaggatagtagaattatttatttttagatttagtttatgtttgttttttgtaggtttggtttattgattttagttttaattttttagcgtttttttttatgatagttttgtttttgcggatattgggaggttattgttatttttttgagttttttttttttttgtagtttttattgttgtttttcgggtggttttgagttttttcggtttgtgtgagatagagggtggtagggatgatatgaggagtggggttgggttttgggtaaagttagtagattgttttttagggagatgatttcgggttggttggagtgttagtatggtagttgaaggtttgggtgttggttagatttgatttttcgtaaggtgttttttttagtaagacggttgttgaaaatagaagttttatggtttaggttgattgtttttgattaaaggaaattattgattttggttttttaagtttttatttcgggtttttgtttggtatgtttttttttttagttgatttttaagatttaatgtttttttaggaagtttttttagattgtgattgttttttattttttgtttattttttttattgattgtttatgtttgttgattcgtaattttattaagtttcgaatgtttagttttttttatagaatgttagttttttaggggttgggattttatgtcgtttgtttttttttagtttgaggtttagtataggataggttaggtggtagagatgtagtaagaggttgttgaggaataaatgaataatttttaattaataaatattattgagttttcgttttgtttaggtatttgtgtgtatttttggtgagtcgatgttttatagagtatgtgtagaaaatgtttttcgagtaaatgaattaatcgttttatttttttatttattggggagaaagtcgggtgggatatattgaaaaagggtacgtaatgacgaatgttattatttaaggttgatagtataaatagtaaaggttattgcgggagataggagagaagaaagatttagatagattttgagcgatgtttttatgtagagagtaagggatagaaggagaagtagagacgggttttataggggcggttttagaattgaaattaaggtttagaaatttagtttaggatttgttaggaattggttttatatttattttgttattatattggggtagagaagatcgttagggagtttttagtttgtttggatgttgggtaagttttttttagagttttggggtatttcgtgttggtataaggttgagtagtaatagcgtttagcgtgggtttaggttattcgttaggggttggattttttatattttttttggagtagttttttgtggattcggaaaggttttatgttgatgttttttttatgatgagtttgttttagggttgaggttatggggtttaagataatgtagttttaatttgtagttttttagttttgatttggaagtaaatttttgattatttagagttattaattaagtagtgaatttatattattgagagtaatgtttgttttacggagggtgttgtgtacgtagtgtggttattatggtatttagtgttttttaaataattttaggttagtattattgttatagattgtttttgatgaagtgggaagtatttagtttaaggttgtatttttaatcgggagttattgagttttttaatttttgttggaattttttttggggggattttcgtattattgggagttgtcgtttttagtgttgggaatttttggttgttggattttagttggagaaatgtatgaagtggaaagttttgtttcgtttttttaatttttatttatttgttttggtttaatttaatggtattattttaatttagttttatttttttaaaataggaaaatttttgagaggtttttaaaggtgattgattttttttttttttttttttttttttttttttggtcgtgatttaaagaatgattttttagagttattttagggagagggtgttggtagtatttgtatgtatagatgtatattcgagggtttgtggtataagtttgttattgtgagtgggtgtggggaatatatgtgtagttgtttgtggataggtttgtggagtgtgtatgtttgtgtggttaagcgtaggtatataagtgggatgtgtgttttcgtgggtagttgtgtgtgggtgtagattcgcgtgggtgggtgtggatatgggtggtgtgggtttgtgtggagtcgtgtataggtttatgtatatggcgttaaggggttttagttattttattttttatggttttgattatatttattttttttttaaatatttgttttgtgggggatatgtcgtttgttttgttttcgggtgagttggttttatatattttgtggcggagtgtatatatcgatgtaatttttttaaaaaaaataggttagtatgaggtttttttatgttattgaaagggtattgattaaatttattgttgtttaaacggttttgtgggggtgagggcggaggttaaagtttagttattgattacgtttttattttattttatttgatattggggtttgtttagagtttaatttgaatgtttttaatttagttttagttttaataaataatgttaaaggggtagtagtgattgggtttagattttagtatatatgtacggggtatagttgtttgtagagatagatagtgtttcggtttttaaggggttgttaatttttagtagagggtggggtggaaatggtagtttttaggttagttagtggtataggttattttgtttatttatagttattaatttaagttttgaaatgttttcgaaataaggaaagtttgagaaattgttttagattagaggaggttaaggaattatgaggattaagtgtaattaatgtgttttggggggaatgttggaatagtaaaaggatattgggggaagttagtgaaatttgaataaagtgtggagtgtagttaatagtaatatttaataaaaagtgggtaaaatattttagtagatattttatttaagaagatttatagggagtaaataagtatgaaatatgtttaattttattatttattatggaaatgtaaattaaaagtataatgagatattattatgtgtttattatagtgggaataagatttgatgatgttaagttacggcgatgtatggagtattcggaatttttatttattatagtgtaaatatttgggcggtgttttatttagttaaattaatattgattttatgatttagtaattttatttttaggtatttattttatagaaataatgatttattttaagaggagaggaatttaaatttataggtaaatgtttgtagtagttttatttagaattatttcgaaatggagatatttttaagtgttttttgataggggaatggagacgtaagttgtggtttatttaggttatggatcgattttatagtgaaaagaaagaattgttgataatgatatggatgaatttgaaaggtggttttagggtttgtaaataaagttagttttaaatttatatgaagtgtaattgtatttagttagtatatgaattttgggaaaggtaaaattacggggattttaggtaatagattattggttgttaggtgtaggaggagggggaaggtttgtttataaagggtttgtattggtgtgatggaattattttgtattttgattgtggtagtgaatatatgaatttatatatgagtgtgttaaaatttataaaagtatatattaaaaagttttttatagttgggcgtggtggtttgcgtttgtaattttagtattttgagaggtagaggcggatggtggattatttgaggttaggagtttgagattagtttggttaatacggtgaaattttatttttattaaaaatataaaaattcgtcgggtatggtggtagttatttataattttagttatttgggagggtgaggtaggagaatcgtttgaatacgggaggtgtagattatattgaattgagattatgttattgtattttagtttgggtaataagagtaaaattttattttaaaaaaaaaaaaaaaaaatttatagtatgttgtttttaaattttaaaaaatgtaattaaaaagaaaatataaaattgtgtttatatatataaaataaaaattaaattaaaagtttatatgtttttatttagaaattttatttttaggaatttatttaataaatgatggtaagtatttattagagagaacgtttattatgttatagtttaatatgtaggaaaatcgatagtaattaaaatatttaataataggggattggttaaataaaggatgatatttttataaatggaagattttttttgatagtttttattttgtacgttgtttttttttttgagatagagtttcgttttgttatttaggttggagtgtagtggttcgatttcggtttattgtaattttattttttagatttaaacgattgtcggatttcggttttttgagtagttaggattataggtatgggttattatatttcgtttatttttgtatttttagtagagacggggtttttttatgttgtttaggttggttttgaatttttggttttaaatgatttattcgttttggttttttaaagtgttgggattataggtatggattatcgcgttaatattaggtatttatttgtttttttgttttttttttgtttattgttttttttttttttttttttatggagtagggaatatatttgaatatgtgtgttttgtttattttgttgtgtaatatttagtattatagttggtatgtagtagatgtttagtaaatatttgatgaataaatgaatgagatgatgttaagaaaggatagcgttttaatatatgtaaagatgtttaatttatattaaataaattttattttgattaaaaagaggaagggagtggagtatttgtttttagaaaatattataagtttttagaagtggtaatatgggtttatgggttaattttgttttttttttttttttggggggcggggcggggttggtttgaattaattttttatttgtttttttaggaataggttgaaatatttgaaagtagtgattagaattttggatggtgtatgttttgagagcgggttgggttttgtgttgtgggattatgggaagtaagagataagtattatttggagagatttagttaaattggaattttagataaatagttaatattttaaataatataagtatattttaaatatggtataagaaatatttttattttataaattatttattatttaaatgtagatttgattgagtaatttggttttgttgtttgtttgtttgttttttgttaaatttgttaattttgtatattaggtttatgtggtatttagggtttcgaaggtaggattggtttttattagatttacggatttatacgttagttttttatttagtttgaggtttagagatttgttttcgttttgtagcgtattgtacgagtatttttaggttttcgtatttttgcgggtatttttttttttatttagtatgtttttttgttttttttgtttgtggttaattattatttttatttggatagttttttttgtaatttttgtgatttttttttcgtattataaatgtaatttatgttttatatggaagattaaaaaaaaattaagatagattaaaagaaaattatttatatatatatatatatatatatatatataaatatatatagagaaaatattattttgtaaatttttgtgtttttttttgagatggagtttcgttgttgtcgtttaggttggagtgtagtggtgtatttttggtttagtgtaattttcgttttttcggtttaagttatttttttgtcgtagttttttgagtagttgggattataggtatttagtattacgttcggttaatttttgtatttttagtagagatagggtttcgttatgttggttaggttggtttcgaatttttgattttagatgatttgtttttttgggttttttaaagtgttgggattataggcgtgagttatcgtgtttagtttataaatattttagtaaaatttaattatatttcgtatttttttttatgttgttttatatttttttattatattatttttaatggttacgtagcgagaataattattattttatttaatttatttttttttgttgggtttataggtttttatttgtttgaaattatagtaggtttgtgatttaaattttttaatatatgtatggcgatttttttaggagaagttttaagaattagaaatatgaagtttaattatttatatatttgagggtttttgagaaatacggttaagttgttttttagaaatatgtaatgtttttagttattacggtgtttttttttattttagagttaataatggttattatagtgtttttaaaatttttgttagtacgatggatgaaagtgagattttgttttttttttttttttttttattttttaattatggaatattttattttttgtttttttttgttgtgaatttttttttttgggtttttaaagtttagttaagggttatttttttttttttaggattttttttgttttttaaatattgaattttttgttttatagtatcggtttatgggtttgttttttttttagattgtgagttggttagagtgggttttttagatgtattgttggggtttgggtttcgtgtgagtaagggtttaggatatatttttggaattaatgtaaatgtttgtgtgtgtttgggttgagggagatttttttgggttttttttgtttttggtttggttggggtagttttgtaggtatagttgagggtggttagtgtgtttgtaggaaaaggttttaggttttggagttgggttttagatataggaggtttttggttttttgtatatattgtttgtgttaggaggttgttgtatggagtcggaagaagggattttttaggatgaggggggtcgaggaaattagttatagcgtagggtaggaaggattaaagatgatttcggtagttttttggttttggataaattttttgttttttgtttgtttagtttaataatattgtatgaatttttgttagggaggggtatgagaagaggagatggaggggtatagttttgtgggaagttaagattgaagaggagttttcggttttggttgtttatttagaaggttaagtatttaggttttagggtttaatttttagtaggttaagattaagattgtagttgtgtatgttggttattaggaggtattgtagttttaataaagttattggacggaaggtgatgattttggggttttagtgtttaatgaggtttttagacgtttgtttgaagatttaggttttagttgggaggatttgttatttaagtagtaatttagttttattacgcgtttgttattattttagtattataagggataaagagatggatggggcgggtcgttggttttttttgtaggggtttttttttttttagttttgggtatttttatatttttgttttattttagtttttttagaatttttatattgtggttttagtatttttattggatagacggttaaagtgaggcgtcgagagaagggatttattagtgttattagtgattgagtgatagataggttgagatttgggtttttttttattttttaagtggtttttttttggagatttatggggattttttggttttttagagagggtggcgtatagtgggtgtttaggaaattgattaatttgtaaaagtttttgttttgtaaaagttttttaggatatttttgtcgtttggtttagcggttttttatgtggttggtagatttgttattagttttttcgtgggtttttttcgaggtaggtattcgtcgaggtagggtttgttatttcgttttttattgtttcgtttttatatagaagtttttttagttttttttgtaatggtaggggtgagtggggaggattgttttttttttagtttagagatggagtgggttttttagagtttaggaacgaaaagggattaatgttgggttttcgtaaaaataaaaaataaataaataaattaaataaaattaggaattgggttttgtattttataaagtattagggtatttattatgttattagtagggttttagtttttttataatcgttaggtttttattttatagttttagaaattgaggttagagggggtaaatgttttgttaagaattaataattgttaagaaggtttaggggtggtggtttatgtttgtaattttaatattttgggaggtcgaggtgggagagttatttgattttagagttttatttagtttgggtgatagaggtagagatttgttttaaaaaaaaaagaaaagaaaagaaaagaaaataaaaaattggtaagaggtagagttgagatttgaattttatgtttggagtatgtttattgggtttttttggggtggatgttgtgggtgggattgggataggtagataggagatagggttaaggaggaagggaggaagttataggagaatggttgtttttagttgttttaagagattggtttttttgtaataatttttaaggttgtttttgattaaattgttttgttgaagattaattttattgattatttgggattttagatgtggattagtgttttgttttagggtttatatatattgaagtatttagaggtaaagaggtatatgagttatatgtttgtaatttattttttttttgtttgtttgtttttagataaagttttgttttgttgtttaggttagagtgtagtggtataattttgattaattgtaatttttgtttttcgggtttaagtgattttttatgttggttaggttggtttcgaatttttgattttaggtgatttatttttttcgattttttaaagtgttgggattataggtatgagttattgcgtttagtttgtaatttattgttaaatgatatagttgtatatcgtatgtatgtatattaatatatatataaatagagtatatgtatagagagagatatagagagagatttagagagattgaaaataatgtaaatatggtaaaatattattatttggggagttagtataaaaggtatttgggaattttttgtagtttatttataattttaagtgtaatattgtattaaaataaaaaggtttttaaaagaaaaggtatgtggattaatggaaagaaggtattttttttaggaattttttttgtgaagttggtatatgtaattatttgaataggatttggatgagtttatttggtaattttttcgttttttttttattattattattatttataattttataaggggttttgtacgttgtaataaaaattataagataaatgttaattttgggagtatatattgttttttagttttttggaagtttttattttcgtggaagttattgtgatttaattagaatatggggtttttttaagtagtttttttgagagttgtaggagattaaggttaagttattgttggaatttaaaagtttaaaaagtattttaatttttgagtttattgtaattttaattgttttatagttagtttaaatgagtaaagtttttttgtataaaaaaaagaaatggtggaaagaaagaattttaaattttgtttagtttttagtttttatggtttttttgttaaggtttgggttttttttattttttagtttgtgtttggaatttgttttttttgtttttttttttattttgtgttttgttttattgatttatttagagttttttttaggaattatggtttagtggaagagatgtatgagggataagtacggttaagtgttttagggtttttagggtaaaagttttgttttttagatacggtagggtttatagaaaggagcggttaattttggttgaaaaggtcggagaaggtttttgtaatggagtggtttttgaattgggtattgttagttaaggaaggttcggtaaggtatgttgtattttatggtaaaataagatattaagatattatttttttattttaaatagggtaaattttaaattattaagttttttagataggagttttttaattagggttgattataattatgatagtaataatgtaatgttttgtattcgtgttgttttgatttatttattattttttttgattttttttagattttatgaggttagtgttggtatttttgttttatagatgagaaaattgaggtttagtgaagatgaataatttgtttaagattatatagttaggaggggtagattggatggttttatgttaagtttattgttttttaaggtggtgatgagttatttttttaatatggaggggttaggtaggttttattttgttttaagggggtattgttgagttattggggttatttttattttaaaggattagggtaaattaagttttagggtttttatgagaagtttatgtatgatttaatatttggagattattttttgatgttttttggggtgggatgggtgttttagttttagtttgggttttaagtgtttttgttagtttttttttttaaggaggttagaagtttttcggtttttcgttttatttttaagttttattttatggcgtgggtggttggatgagattttgttttcggtaggatttattgttagagaaatagagttttttatgtttttttttattttagtaatacgttcgtagggtttagagattttattggattagattttttttttatagttaagatgcggaggtttagagtaaggttatattgtttgataatggaagggttaggatttgaattttgtattttttgtatttagttttgtggtttgtttgtttattgttttttttaagttttttaaattatgtggttttgggcgtgttttaagatattttttatttaatttttttaagtttttgttttttttttgtagtagaaagaattttgtagttttattatttttattaagatattgtaatattatttttatttagaggttggcgagatggaggagtttagattttgtacgaggtaaaatgaaatgattgagaagtttttggggtaggataggtttgggtttggtttttggttttgttatttatttgttatattgatttatttaatagtatttttggagtattagttatgtattgggtaaagttttaggtggtgaaaatataaagtttagtaaaatatagtttttttttttaaatggttcgttttagtgataggggttatggttatagtgtagggtggtgattagggtaggggtatttagtttagttttggggcgattttagatttttgtagaggaggtgttttgaagtagtaatgttgttggagaggtttgttgaagttgtgtttagttaacgttttatataagattagggaatgttagttttttttatgaaagaaatgggagtcgattaaaggagattattaaggaggtttttaagttattttgtggttttgttatagaagggtatttttggaaaagtgatttgatttttgtgtgttttagtttttttatttgtaagatgaggttgagaatatttatattttagaatggttgtgaggtttgattgaagtagagtgtaagacggtatattttttgatttatatacggtatttattttattaatgggacgttgttatgatatattaatatagttatgatttggggatgaatttggtcgtggtagttgatagttagggtaacgttgtttagtttgtaattgtgttatttttatttgtttttttttttaggtgtattttttttagtttaggtttttcgagcggtagtttttagaatgatatttatgaattataaatttttgttaaaagtagtttttagggttttttttaatgaagggtttattttatatatatataataaagattataaatggggtgaaatattggtaattgttgtaaaaattaaatgttaaatttatttggttatatagatttaaaaaaatttttaaagagtggatttacggtagtttttgtttttagattgtgtttttattaagggtaggggaggggtgttacgaggtagcgttattattcgttttgtttgttgttattgtttggtatttaagtacgtgttgaattgagttaattttaaataattgaatttttttttttttttttttttttttttggagatagggttttgttttgttgtttaggttgaagtgtagtggtgcgatttcggtttattgtaattttcgttttttgggtttaagcgatttttttgttttagtttttcgtgtagttgaggttataggtatatgtcgttatatttggttttttgtgttttagtagagatagggttttatttttgttgtttcggttggttttgaatttatgagtttaagtaattcgttcgttttagtttttcgaagtgttaggattataggtatgagttattgcgtttggttaaataattgaattttttagtttgtagaagtagtatatgattttagaaagaatgtgttgtttttattaatattaaatttttttttttttaaatgtgttttttttttaatttttatttatgtatttatttatagagacggagtttcgttttgttatttaggttggagtgtattgatgttatttcggttaattgtaatttttgttttttaggtttaagttatttttttgttttagtttttcgagtagttgggattattagtattggttattgtatttggttaatttttgtatttttagtagaggtggggttttattattttggttaggttggttttgaatttttgatttcgagatttatttttttcggttttttaaagtgttgggattataggtgtgagttatttcgtttggtttaaatatatttattttaatttagagaattatttataaattgaaaaagtaataaggtttttttttttttggatgagaaagggaaagtaatggtttaattaattataagattgttttttttttttttgttgtttaggttggagtatagtggtataattatagtttattgtagttttaattttttgggtttaagtaattttttttttttagttttttgagtagttggtattatgggtatataatattatagttggttaattaaatttttttttttttttttttttttgtagagacgaggtgttattatgttgtttaggttggttttaaatttttggatttaagtaattgttttattttagttttttaaagtgttggaatataggtatgagttattatgtttagttttagtttgtattttaggaaagttattaatttttttaaagttgataagaatgggaaagattttttaatatttgttttttaaaaaatttatatttataattataaaatagttaataatttaaaatatttaaaggataattatatttaaaagttttggttggtgtttttgtataaatgattgggatttggagtagatgggtttttaggattttgtttattatatatagtaaggataaaatataaataattaatgttttagtatttataattaatatgttagttaaaaatggtttttttggtttcgtatggtagtttatgtttgtaattttagtattttgggaagttaacgtgggtagattgtttgagtttaggagtttgagattagtttgggtaatatagtaagatttttatttttataaaaaaaatttttaaattagttgggcgtggtggtataagtttgtagttttagttatttaggaggttgaagtaggagaattgtttgagtttaggaggttgtggttgtagtgggttatgatttagttattgaattttagtttgggtgatagtgagattttgtttgagagaaggaaggaaggaaggaaggaaggaaggaaggaaggaaggaaggaaggaaggaaggaaggaaggaaggaagtaggtaggtagggagggagggagggagggagggaaggaaggaagaaaatggtttttttattgatttttgtttatttgaataaaataaaaaatttaaaaaagttttttttttaaaatgtatgatgtggttaggtgtagtgttttatatttgtaattttagtattttgggaggttgaggtgggcggattatttgaggttaggagttcgagattagtttggttaatatggtaaaattttattttaaaaaaagaaaaaaaaatatatatataatgtatggtgtgttttttttattaagtaaattttaatttatagcgaacgtgagataaatatattttttttttatttgttattattttttggtaggatggattttttgtaacgggatagattttttgagaggatattttgtgtagtataaaattgggttttgtggaatttttttttatggggttaaattttgggggatgtattaatatagtagagtttgggtatatatattttttgaggaggtttggtttttattgtttatttgttatatggtataagtaatatttttaaattggttttttgtttttggtttcgttaatattgggttagtgaggaggttattattcgttttgtttagaagggtttgttttttttttttttatttataggagttgtttttatatattatatgggggttttgggttgggttggtttggtttttaggatggttttggagggaggagggagtggtgtttgggcggttaggggatatggttattattttagtagatgggcgaagatggtgtagtttacgtataatatgtagtgtgttgaaaattttttttagtgtattttttttatcgtttatagagtttttatatgttggttaagtttgatgggtatataggtatgagggtatttaggtagtgggtatgagttttttgggtaggggaggaaaaaggttttttggttttaggagatttgggtttaatttatagcgggatagttttattttttttatttttaaattgaggatattaatattttttagtgggtttttataaaaagttttagtttaggtgtggttaagggtaatgtttattaggtgtttttttaattgtagatggggtttaggaagttggggtttaggaagggtgtagaggttgtttgatattttttgagttcgattttttgtgtttagttttgtgttgattagagaggaatatagtagaatttttgttttggggataggttgaagttttgggttaaataaatatagaaaatatatttagtagggagagagttattttttagtttatgatatatgtgtacgaggtgtagtagtttatggggaggaggggtttgaggggtttgggtggtttttgtttttttttgaagtttgttttcgttgcgttaggtagagatggtagttttcgttttttttattatttatttatgttttaaaagataatgttaattatatagtaattatagatttagtaataatttttttattttttaattttatgtattttagttaattttaattgtttgttaaggttttcggttagtttgatagagttaaggttttagtaaaattttattaattataatagttaatattgattgagtatttattatgttttaggaattgttttaagatttttatttatttatttatttatttatttatttatttatttatttagagatagagtttcgttttttttgtttaggttggagtgtaatggtgtggtttcggtttattgtaatttttgttttttgggtttaagtgatttttttgttttagtttttttagtagttgggattataggcgtttattattacgtttagttaattttttgtatttttagtagagatagggttttattatgttggttaggttggttttaaatttttgattttaggtaatttatttgtttcggttttttaaagtgttgggattatagatgtgagtaattatatttggttttgtttttgtttattttattttatttaagttttattttattattaataggtagatatgatttttatttttattttataggtaaagaaattgaggtaaagaggttaattaatttgtttaaggttatttagttatgtgggttgaaatttgtttttaggttttgagttttatgggtttttttaaattaaaggtatttgaagtattaagtagtttgtgtagtataattgtggaatgaatagtttttatgattttttaagaattttagaaattatgttttagggtatatggttggaagattaggtttaagtaggtttttgtttagttatttaggtcggggaagtttttaggaaggggagtcggggatagttatttttttgtagttgtgttttttttggattttgttgtttagtttttggagttttagtttttggttgtgttatttattggatggtttagggtaggggatagggagttgtaagtgttttttttgggaatttaatagaaaatttttaaaatatgtatggggttaatagtatggagttattggatgttttttttttggagtttttttaagtttcgttggaaggattttggaattattttaataaaggaagtggttttagatgtgcgtattttaggaggtgggtgtatagatttttagagtataaaagaatttttttaaaggttacgtttttatgggatggttaattgaaggggtagaggggttttcgaatatttaggggtttagttagggttaagattgtggttttagagttttcgtttttggttttgttttttatttttttttattagttttaggtttcggaaaataaatgtgtttttgagttgaatttttgtgatttgttggttattggtttgtaggtaaggagatgaacggatggtttataagggtttttgtatattttgtaattttggattttatattagaagattatttaggggttagatagataaatgtaatagaatagagattagatgtaaatttttaaatatatgcgtaattgatttttaataaaggttttaagatcggtcgatgagaaaagggttattttttttataaatggtgttgggaaaagtggatatttttataaggaagaatgaagttggagagttttatgttacgttatatttaaaattaaagttattaaagatttaaatttaagagttaaattataaagtttttaaaagaagatataggcgaaaatttttttgatattggagttattgacgattttttgaatatgatattaaaagtatagataataaaataaagaaattgaaaaattgtatttttttattaaaatgtaaaatttttgtgtattaaaggatagtatttagggagtgaaaggataatttatagaatgagaagaaatattcgtaaattatgtatttgaaaaggaattaatatttagaatttttatgattgaagaataaggaaataaataattttatttaaaaatgggtaaagtatttgaatatatttttttaaaggagatatataaatggttagacgttaaaggagaatattgtatgattttatttataagaggtatttaaggttaggtgcggtggtttatatttgtaattttagtattttgggaggttgaggcgggtggattatttgaggttaggagtttaagattagtttggttaatgtggtaaaattttatttttattaaaaatataaaaattaggtaggtgtggtggtgggtgtttgtaattttagttatttgggaggttgaggtaagagaatcgtttgaattcgggaggtggagattgtagtgagttgagattgtattattttattttagtttgggtaataagagtgaaattttgttttaaaaaaaaaaaaaaaaaaaaaaggtatttatagtaggaaaatttatagagagagagtagaatagaggttatttgggtggggggttaagggtgtgatggcggttttcgtttaataggtatggagtttttgtttgggatgatgaaaaagttttggaaatagtggtgatggttatataatattgtgggtgtatttaatgttattgaaaggtttatttgtagatgttaaagtggtagtattttatgttatgtatattttattataataaaaagtttatttttaattaaaataaagattttgaatgtaaaaagtaaaggttatattgaattatgtaaagaatatttagtttggggttttattgttttgtttagagttttttagtggtttttttaaagtttgaattttttggtagaaaataaatggtttaggggttaggcgcggtggtttatgtttgtaattttagtaatttgggaggttgaggcgggaggattatttgagtttaggagtttaagattagtttgggtagtatggagaaattttgtttttattaaaaatataaaagttaattgggcgtggtgacgagtttgtagttttagttatttgggaggttgaggtgggaggattatttaagtttgggaggtagaggttgtagtgagttgagattgcgttattgtattttagtttgggtgatcgagtgagattttgttttaaaaaataataaaataaaataaaataaaataaaaagttttttttagttgtgtttttgttattttttagtttattttatcggtatgtattatgtttttgtattttatatatttgttttatgttttttttttattcgaagatttagtttgtgttgttttttgagtttagagggttttttttattttttttagttggtgagtttttatttaatttttaaggtttatttcgaatgtttatgtttaggaagttttaatttatttattttttttggggatttttatggtatgtagtatattttaattaggttatgggttttttgagggtaggagttagtttatttattgttaaatattttggtttttgtttgatatagaagtgttaggttgaaggatttgttggatgtaaggaggagtttttgttaggcgtatatttttttatgtattttttttgagttgttttttttttttgaattttggtttttatttgtaaaatggagatttaatttttttatttaggtttttggtgagatttaggggattatggatgtttaagtgtttttagattgtatatgtcggggtgggacgggtggacggaattatgggtgtgttgggaagagtttaggttttggagtcggatgttttgttgggaattcgggtgaggttagatggtattttggttagaagagagggttgtattttttgtaggtgagttttagaattttagggtggaggatgagtgaatgggggattaagggaggaattttagtagtttttaggtagtattttgggtaggtggtaggaatgggggtgttagcgggtaggatacggaatttattgtagggaatgggggagatttgaggaggagagttggggatgaagggagaaaattatttggttagagtcgatttcgggggttgtggtagttagatcgtaggtttgtggttagtggggtgagatttaaaagaggagtagtgaggaaaaggggtattttttcgattgttagagttggagaagattaagatttgtgttaaatagagttatttagagtttcgttgtttttatattttataggaaattttgtaaaaaaaaaaaaattaataattttttattagaatgtaagagaacgataaagtaggtttttattttaggtttttatttaaaggaaggatgaacgaagagagagtggaaagatttatagagtttttagtatgttttttttttgtaagatttttttatttatttatttagtaatagatatttattgagtatttattatatagattagttttaggttttggggaaagttggaattaaaatagataaagttttttgcggttttttatgttttttagagggtattgtttttatagatgttttttagttttattttattttgattagaggtttttttatgtttttgaaatttttggaaatttatgtagttattttttatattagttatgaggttttatgttatgtttgggatattgtttttatttggtataggtgaggaagttgtgtttaaggttatagagttaggtgtagaattttaatttgataggtgtcgaaatttatttttgatattatttgttttttgtattttcggttgtgaagttgagaagaacgttttgggggttatggtttttttttttttttttttttttgtgagatggattttgttttgttatttaggttggagtgtagtggtaggatttcggtttattgtaagtttcgtttttcgggtttatattatttttttgttttagttttttaagtagttgggattataggcgttcgttattacgttcggttaattttttgtatttttggtagagatagggttttatcgtgttagttaggatggttttaattttttgattttgtgattcgttcgtttaggttttttaaaatgttgggattacgggtatgagttattgtatcgtgttttgggggttatgtttgtaagattttgttttttatttttatattatttgggatggaattagggttattttaagtttaattaggattattttagaataggatgttttttaggttttttggagttttcggttagtaagattcgattttttttttttggttgttttattgtggacgagttatttattttttatgaattttagtttttatttacgaaatggggatgataatagtattaattttataggattgtgatggtgattaagtgaaattatgtataagtagtattggtgtattgtttggcgtataggtagggacgtttagttgttttgggttgttttatggttttgtagtagtagttaattttaagttttttttgttttaaaatttattattgtttttgttttgtagatgggaaaatttaggttaggagttaggtttggtattttagatttttaatttttggtagattggattagtttttttttttttttggtataatgaatggggaagagtgtggggttttgaggtattttgaggattttggagggttaatttattttttttggtgaatattatagaattttaaggtttttgaaattattgagttttatgaagaaggtttagagatggggaggttgaggttataataggggagttatgtagtagagttatgtgtatgtttgttttttttatttgaaagtgagttttttttttgaagttagaggttatggagttggagttgttttatttttatgttgggatgtgagttaggtgtgaatggatttttgtggttatatagagatatcggggaggtttatatatttaggaggattttaaattttatatatatattttaaaatttgattagaattttattattattatttgtaatattttagtatttttaaagggtatagtgtgaggggtggggtagagaatttggtggtgtaggatgtacggggtagatatattatttttttttattattatattttttttatattttttttttaggtgggatagggttaaagtgttatttaatatagggagaaatggagtggtattagagaagtaagggggttgttatatatgattatttttatagaaaaattaagagaaagtatggagggagaaaaggagaaagttaagagagaagaagttttaggatttttagttattagagaaaatttattggtttggataaattttaattttttttaatttttttgtattttttttttaagtggtttttagtaagttattaaattttggtggcgtttgtacgttttagggtaagttagtttgattttttttttagagtttgagttagggttttttttattttagggtttattttattgaattggaattttaaggttatttgtttgtttttgtttttggatttgaaggtaggggttgtatttagagttttttagaatattttataaggtttggtatagtgataggtaaagtttggtgagttttgcgtaaatggaattaagttttttagttttttttgtttgtgaaataagatatgtgggttaggagatgattgttattttttttaattttgagtgagattttttaatatgttattatgatttattgtgtgtgtgttgtagggttaggggaggtattagttttttcgatgtaattaaaggtttttagggtttggtggatagttttatatagtgggaggagttggttatttggttttagttgattttggtttgtggtttttaagaatttaggaaaagaaaatttagtttggggagttgggtagagagtaggagttttagtttggtggggttgtattagagttaggtttttgtaattttattagggattttacgggtgtttttttgttgttttttaatgtttaggagtttatggcggggtttgttttatttttaaggagattgaggtagaattgtaagtatttgttttatttgatgtatagagagagtgtaatttattggatttattgtaggagtcgtatttaataagagagcgggtgagtggattggattttttaatattttttgtttttttatttattgtagtggaaggaggagaattcggtgggtttttgtttttttattaatttggttgtgggggtttatttttttttgggttttagtttgtttatgtgttaaatggggttagtagtgggtatagatagtgttaaggatacgtttttttcgtagtgagttatacgggatagagggtatattttagagttggtggtttgttagacggtttcgtcgtagtgtgggtgggttggatggattatgttcgagggttttaggatgacgcggggggtggttgggttttatcggggatttgttatagggagattttgtttgttattcggtgagttagttgtttttgggagttatgattaggggtaggaaggttataggttatgatgtaagggcgtttagttattttttttgggggcgtttttggaggtagaggttatgttatttatagatttagagaagttttagagtcgtgtatacgggtatttatttttgtatatttgaggttcgtatattgggggatatagatataagtgttagaggatagatatgttttttatcggattatatataaattttcggtttcgttttgaaatatttagatagtaggacgtggatttagagagaatgggtacggtatatatcgtttatatttatgttgtgtatacgtttatataaatatttaagttggtttttgggtgtatttaattatgtgggggtaatattgtaggagatattagttttttatttatttttttagttagcgaatatttgttaagtttaattgtataaaatatttggaaggatataagtcgtaatataggaggtagggatttggtatgttttattttttaggagaaggttcgtttagggaaggtgttttataaatattgggatagggaagatgagtggatataggggttatgagttcggggttttagtttgagtttggttataaagatatttgtttattttttttttatttgtattttagttttgagtttagaatttgtattttattatggttttgtaggatttttagtcggttttgtgttttgtgatggttttttatttaggatttgtgttagtttttagggaagttttttttatttattttattttagttttttttggataaaaatgcgtgtgggggtgaggagggaagataaagggggtgaaggtgggtttagattgttattagtatagaaattttaagagggtttttggaaattgttaatatttttgtattttatatagttaaaatttagatttcggagtagaatatatttttttaaggttatggaggagtagagaatgtaaaggtggaggttggggtgatttatatcgtaattgtgggtttcggtttttacgtgtgtcgcgttggatattagtgttatggtttaaattttttatagttttttagttttttttgttgtggtttttagagttttggagagttagttgttttgttttgatttgggttattaggttttgtttttttacgaggtgcgtggggttaatatttatgttgggtttttagtttagaatgaaaatttatttttaaagaatttgttttaagaattcgatgaagtaagtattggttttttttttgtttttaatgtgtagcggcgttagtgtttagtagttttgattaagcggtttcgagtataagcggcgtttttatcgggaaagataggtatttggtagtcggtggttttttttatttcgttcgtattttttagtgattttttttttattaaaacggtattttgggagtcgcggagcgttacggtgatttttttaattgtttttggagtttaaattcgaatcggttcgcggttttgagtattattttatatattttagttttggttttttagagttttgtttttgcgtggttttttttcgtcgttgagttataatttttttttattttttttttttttcggcgttggttggtgcgggttggggttaggtggagaagtcgttttttgttaaggtgatagaacgtgttgggggtgggggtcggggttagggtcggtgtaattagggggtcgttgtttttttttggatatagtggaagtttttttcgtattattaaatttttgttattttttttgagggatttgtttttaggtagtacgtaagttgttgtttcgggtttatttcgtatttttttattgggtgaggaaggagtattttgaatggagatgggggtgttttcggtttatatatttgtagagaagaggtgtgtcgggttgtatttttggaggtcgcggtaattgatattagagaagatttcggttgtagttgggaaggtttattggttggaaagaggtgttttttttttttagtaaagggttttgtttggaagggttgttttttatttgtttagtggtattataggacggtcggtttttattcgaattttttcggacggtattattatatagtcgggttttcgtagtgttggttttttaattcgatgattgttatttcggtgaggatttgtgttgatggtcggagaattttgcgttgcgggcgtatatggttaggtggcgtttggtaggcgacgttcgggtgtaggacggcgtttttatcgttttattttaaatcgttgtttgggtttaggtttttcggttttttgaataggggtttggggggttaaggacgttgaggtttcgggggtaggaagttttttttggttaagcgttttttttttttttcggtatatatttttttatttatttatttcgtttattttcggggcgagaggtttattaaggtagggcgcgttttttttatgaattattttaaggtttttgagtcgcgggggtttcgggtaattatttttttttttttttggttttaggtattttagtttaggggtttgtagagaagttcgaagttcggataaacgcgtcggacgttaataattttttatttttggtagtagtaaaggttaatatatttttattttttattttagtttgttattaaaataaagttgcgcgcggttgagggtaggaaggcgttgagatcgagaagaagggacgtttcggagaaagtgcgtttagttgattttagaaattagagtttttcgggatttcgtcgagattttttgtagggcgttttaatttgtttttttattgcgtgtcggcgtcgtagcgcgtgcggtttagggtttggtgatttcggtttagttcggcggtcgcggcgaggtttttggcgtagtcgtttggaatttcgtattagaatcgggatcgcgtaaatgttttggttgaagtgttattttatttaagaaatattgttgttaggaataaaatggggttttcggtgtttcgaagtattttttgaaatttttttaaaataatttataaaaaatgtttttgttttaacgttttataacgtttaaggaaatatgtaaatggtttgtttttttatcgagatggtcgttttaattaatagtgtatatatatataataatttttttaatttttttttttagagttaagtattttattatatgtaaattataataaagaaaagattgtgtaagattatgtaagtcgattgatttaaaatattgagttttaatttaggttttttgtttttttatttaataatttttgtgtttggattagattggtgaagtaggttatggaaattaataaagtaaaaaattaaaagtattttttttcgttatttttttttttaaaattaaataatagtcgtttttttttgagtaggttttagttttaggttcgagtttttttgcgattattttatagttatttatagtagttgttgttgtttttgtcgggttttcgtttttgttttttttgggtcgttttttgtatataaaatatattttagttttttaattaaatttaaatacgatttcggtagaatttatatatttcgtggtgtatggattgtgtcggtgtaggggaaataaatattttttggtatttaattattgagtttaattcgaaaaatcgggattgggtttttaggcggtattttaggggttttaatttggttcgcgtttttttagattttggcgttgagagcgttgtttttgcgggtgggtggacggagaggtaataatttgtttttaataaaaatttgtcgttatcgaatcgaaagcgaaagggaagggagaagaggggtagtttttcgtagcggtttcgcgtttcgggataggtagattaggattagtacgcgtcggttgtagtttcggcggtcggattcggagtttgggggcgaggcgtcggagtttttgttttgagtatagggaggttttttgcgtcgttgagaaacgtcggatttttaattcgatatgttttttgtggtttaggcggttcgttttggattcgggtaaggaatttaggaggttaaagagcggatttagagtttggaggggagaatggtgaagttttgggttgtaatagaagagggttcggtgggggttttttcgtaaaaacgcggttttcgtatttaaaggatattgcggagtcgttttaatcgtcgtttttttagtatatttggggaaaggaaggtttaagttggggtagggacgtttgtagttcgggagggttttttttattaatttttttcgtaattcggtttagattcggttagtagagattggaggcggttttttcgtttcgtattttttcggtttggtttaggtttagttgttcggggtattttttttgtcgagaggtaattggattttgtcgggagtgggtttagaagttgaggtttaggaagaggttttcgagttttttttttttgttaggtgtagttatatacgtgaaagaatagttttcgtttcgatttttagggttaggaatggttgttaggttttagttgtttgtttgaagacggagattagttagcgttagtattggtattaaggtcgtttttgttttcgatttttttaatgtttttgggagcgtttaaggatttttttttgaattttattttttcgtttttgagtatatatatttttataattgtgggagagaatcgttgttaatgtatgttttagtttttttgtttgttggtagggtagggattttattttagagtttttttttttggttatttttgttaagggtagagttttattttttgtatttttagtttttttattttagatttaacgcgtttaattttttttttagaaggattagatattttttggttggggagatttagttgttgagagagggaaagaataaatattgatttgttgtttattgtttgtggttttgtttcgagtagtgtttttattttaggtagtatggagtggcgttttgtcggtagttataggttgtttttggttttagtttgtagtttatgatttagagtagtggtagggatttgttttgtttttagaattgggtgttttcgagtttttagcggttcggagatagatagggatggaaatgtgggtgggggttgggaggggtaggggtagcgggggtttttgtttttgttttttgttgtttttgtagaggtatatttatgatttagtaaggtttttttgttattattttaggatgtagatgaggaaatcggggtttgggaaggtgtttgttgttaggttatattgttacgggttaggggtagtagcgggttaagtggttggtttttttcgttagttttaaaggttagtgtaagtagaggaagggttaggttggttgtgggggtttagtaggatatagagagagggtttaggggaggttaggttttttcgttttttttttggatttgaaggtatttaattaagaggtggggagttttttaggttttttttttgtttaatgtattagtttttttagaggttttattggtaatttttattaaaatatgaaaatttaatgtagtggagagagagtatgagttttttggttatgtaggatgaatttttatgggttttttagtttgcgatttgtttttatttaatagttttgaatgatagggacgagttggggtttgtatttttgggttgggaaggatagttagtacggatagggttgagagtttttgttggtttagtacggaaagagtgtttgtatgagagttgtgtgtgtttatgtgcggagttgtgtgtgtttgtgtgtggagttgtgtgtgtttatgtgtggagttgtgtgtgttcgtgtgtggagttgtgggtgttcgtgtgtggagttgtgggtgtttgtgtgtggagtagtgggtgtttgtgtgtggaattgtgtgtgtttgtatgtggagttgtgggtgtttgtgtgtggagttttgggggtttgtgatttgaatgtttgattttattttaattggaggtgaagaggaaggtggaggaagtggggaagggttattgaatttttttaaatttttttttagttttgttttatgggtttgggagtatgtggtttattcgaggttatatgggtatgtgtttttggggtatgattatatcggtttttaaagaagatgttttttgcgtgtgtgtgtgtagagtgtaattgtagataagtatatgattgtgaatgtttgttagtagttatttatgaattagttttgcgtttgtgaaagaaggaatttgaatacgagaaaatatttgttatcggttgtttttttaaagttattttagttattaaggttttcgtcgtgttttagtttttgtttttaggtttagtgtttttttattagtttggattagggtaaattttttgtttttaattttttttattagggtcggatttgaaggttaaggttttcgggtatgtgtttaggatttttggtttagagaaggtttttttttttttgcgtttttgttttttttttcgttttggggtttaggaatttcgattttttggaagaagagaaggtttaggttattgagttgttttggttagagacgtttttgagtgtttttttttttcgggtaatggtggttgtgttttggggggtttaggtttgttttttgtggttgcgtttaaggtagtttggaggttatttaggttagttttttcgggtttttcgtgggtttaaattaggatttagattttttttttttgttatagttttgggttatttgggattcgggattttttgtttttttttttattttgttttaaattattgtttagaggtttgtcgtttttaagaatcgtcgagggagaagttttaggggaattggtttgttcgtatttttattgttagtagcgtttagggttttaggattcgggttttgttagattatagtgttttttgggattttagggtttttggtttcgtattgtgttgcgttagtgcgtttggatttttcgtgagttttcggttaattacgtttcgggtttttcgtttggtttcgtatttgcggcgtttttatttgcggcggcgtcgttcgaggagttttttagtcggcgaggagcgaggtttttgtagttttgttgtttcgtagtttcgtagtttcgtagtttcgtagtttcgtagtttcgtagtttcgtagtttcgtagtttcgtagtttagcgttagagcgttgcgcggagattttttgtcgtcgtacgttttgggtcggtaagaagtattcgttttaaatttcgtttagcgggtagcgtaaagcgagcggtttggggaaatgtcgaagggatcgggaaaaataaattttaagtcgagtttaatagtcgaaacgtttcgtgtttaggtcggcggataagaaggagatagaatagattttttggttttttcgtagcgatcgatttcgtttatcgattagagttattatttcgtttttagttcgttaatttatatttttcgtaagttattagttttaagggatgcggaagttaagtatttcgtggtttttagtattaggtgattcgtacgtgtatttatcgtagtagggaatttgtaaggtcgcgttgtggtcgttgttgtttttttggagtttgaggttgtcgttcgggggcgttttgtaggcgtttcgttgtaagtaaagatgcggttgcgcgggcggttggggttgcggttgttgttgttgcggttgcggttgcggcggcggttggggttgcggggtcgacggttggggttggaatttgttaaaggagtttcgcgttttagttttattttttaggggtgtcgttaggttttgttgtttagcgtcgtaacgggttcggtttttggcgttttcgaatttttgtgttttggcggcggtcgataggaaagttgtgtcgaatttgtcgttttcgggaaatgttttaaaaggcgacgagttttttcgattttgcgatatcgggttgtagtaggcgtttatggtagcggtcggcgattcgtagtaagagacgtaagttttagtatttatgtttggtttgcgtaggcggcgggcggggacgcgagcgagggcgcgaggacgttatcgcgcgttttggttgggagtttggggaggcgaggaggttgtggttgtgtattttttgttcggtttgttcgttttttttttttttttttacgtcggttttttttttttttttttttttttttttttgttttttttttttttttttttttttttttttttttttttttttttttttttttttttttttttttttttttttttttttttttttttttttatagttagtcgagggaaagaacggagggtagtaaaaagatttagatgtttcggaaagttgattagattttttaaatttttttaaggttttgtagcggaaaaaaaaaataagtaaatttttttttttgttttgtttttttttttttttttttttcgttttttttttttttttttttttattggtttttgtttttttttttttatttttaaggagatgttattaattcgttagcggggatttaattcggaggcgttcgagggttttttcgattttaggcggggttggggagatgttaggatttttagggttttcgaggttaggttgagaattggcggggtgtcggagttttgttttagggtaaagggaaatgtaaattttaatgataggttaaaaaaaagttttttaaaataaatttaataggttttgatattcgaagttagggggattacgggtttgcggatgtaagcgagttttacggatttttgcgcgcgagttcgcgggcgtcgttgcgggttttttcgttggtatttttttttaggtttttaatttttttttttattttcgtttttacgggagattaatatatatataagttttcgtcgtttagtgtatggttatttgtacgttttgttaattatttttttttgttgtaagggcgttgggttgggatgtagcggaatttgtgtttttttaagttttggagaagttttgggttgggttcggttttagaagttttagagcgttgttttttgcgttttcgtttagaggtcgtatcgtttacgttttacgtttgcgtttaggcgaggggattttttgttaggcgaagtatagagagcggattttggagattttttgattttgttcgatagtcgcgttgttatttgtttattttttggggttaggggtcggggagaggggtgagatcgttttttttttttttggttttattgttttcgattgtaaaacgaattgtttggttttgataggttgtggttttattattattgcgagttttaaggtttttggtatcgttatagtaagggaaaaaattttgcgcgtgtagtttttcgatttcgttttatgataatcgtgttagagattggcgtttttaattttttgatgagttaacggaggtttagagaggggcggttatttggtttaggttatatagttgggaaatagtcgtcgcgttttggaatttttgtttaggttagtttttttatcgatttggaaggtcgtgcggatagcgtagatgtagaggggaaattggttttcggttgtggaatggtttaagttgaaggagattagcgagagtagttttttttaaatcgttgagaaaatcgttaagcgagaacgtatttttagggagtttgggagtagggtgagaggtaaaagtgtaaggtaaaattaaagagggtttgagtatcgtgaattaaggaatgtgggttagatgttaattttttgtatttaaggttttttaaagaaaaaatatatttggggggtcgcgtttttgtttttaattttatttgggttaatttttatttttattttatttttttagtatttttggtttttgtttcgtcgtcgatcgcgcgattttatatttggtttttatcgtcggtttattttgaagtgttcgttaataaagatatttcgtaaattaagttaggagcgcgtaggttttagtcgttttttattttatgtttaatgggaatcgcgttttattggttcgtagatttaagttatttgagagttttttatttattgagtttttgttgtgttaataatttggtaatataaggtttattatatttattttgtatatgggtagattgagatttaattaaaataattttttagttagtaaaaagcggagtgtttttgttattattttaaatgtttttgtttagcggtttttttaagtttttagaatttgttaaggtttttagtttgtgtattgtagtataggtggttttttttatttggaattttttaaatttatttttgtatttttgtttggttaatgatttagagtttagtttagagtatttttttttaggaagatttttcgttttttttagtttaagttgacgttttcgtttgttttattttcgttttagatttcgtggttgtttggttgtttggttatgagtgtattttaattttattagttgttttagggtagttttttacgtgtttggtattttataaatatttgtggaataaaagattaaatttggattaggcgcggtggtttatatttgtaattttagtattttaggaggttaaggaggatggattataaggttaggagatcgatattattttggttaatacggtgaaattttgtttttattaaaaatataaaaattagttagacgtgatggtagacgtatgtagttttagttatttgggaggttgaggtaggagaatggcgtgaattagggaggtagagtttgtagtgagtcgagtttgtgttattgtattttagtatgggcgatagggcgatagggtgagatttcgttttaaaaaaaaaaataaataaataaaaataaaataaaataaagattaaatttggggttgtaggattttattattttagtgtattttaattgtttagtgtagtattaagttttgagattttttttttggttttttttagttaaggatagttggttatttatttattttttttttaaaaattaagtagcggaattaatagcgtgttggattttt

SEQ ID NO: 4 - DNA, 52626 bp, Artificial Sequence
  chemically treated genomic DNA (Homo sapiens)
gaaggtttagtacgttgttaatttcgttatttgatttttgaagagggggtgggtgggtgattagttgtttttgattaagggaaattaaagaaagagttttagaatttggtgttgtattgagtagttggaatatattgaggtgatagagttttatagttttaggtttaatttttattttattttatttttatttatttatttttttttttgagacggagttttattttgtcgttttgtcgtttatgttggagtgtagtggtataaattcggtttattgtaagttttgtttttttggtttacgttatttttttgttttagttttttaagtagttgggattatatgcgtttgttattacgtttggttaatttttgtatttttagtagagatagggttttatcgtgttagttaggatggtgtcgattttttgattttgtgatttattttttttggttttttaaagtgttgggattataggtgtgagttatcgcgtttggtttaggtttaattttttattttataaatatttgtggggtgttaggtacgtaggaggttgttttggggtaattagtggggttgagatatatttatagttaggtaattagataattacgagatttgggacggagatgaggtaaacggaagcgttaatttaaattaggagagacgggaagtttttttagaggaagatgttttaggttgaattttgaattattagttagataaaagtgtaggaatgagtttagggaattttaggtaggggaaattatttatgttatagtgtataggttagagattttggtaggttttaggaatttgaagaaatcgttggataggagtatttaggatgatggtaggagtatttcgttttttgttaattggaaaattattttggttgagttttagtttatttatatgtaaaatgggtatgataagttttgtattgttagattgttggtataataggagtttaataaataaaggatttttaagtggtttaggtttgcgggttagtgaggcgcggtttttattgggtatggagtggggggcggttggagtttgcgcgtttttggtttggtttgcggaatatttttattaacgagtattttaaggtaagtcggcgatggaaattagatgtgggatcgcgcggtcggcggcggagtaaggattagagatattaagggggtagggtgggggtaagaattagtttagatgagattgggagtagaagcgcgattttttaggtatattttttttttgggagattttagatgtagaaagttgatatttgatttatattttttggtttacggtgtttaggttttttttaattttattttgtatttttattttttattttatttttagattttttagaggtacgttttcgtttaacgatttttttagcggtttaaggaaggttgttttcgttggttttttttaatttgaattattttatagtcgggggttagttttttttttgtatttacgttgttcgtacggttttttaggtcggtggagggattagtttgagtagaggttttagggcgcgacggttattttttagttgtgtgatttggattaggtggtcgtttttttttgagttttcgttagtttattagaaaattgggggcgttaatttttagtacggttgttatgaagcgaaatcgaggggttgtacgcgtaaagtttttttttttgttgtggcggtgttaggggttttgaggttcgtagtggtggtgaaattataatttattaaaattaagtagttcgttttatagtcgggggtagtgaggttagaaagggaagagacggttttattttttttttcgatttttgattttaaggagtgaataggtgatagcgcgattatcgggtaaggttagggggtttttagagttcgttttttgtatttcgtttggtaggaaattttttcgtttgggcgtagacgtggggcgtgaacggtgcggtttttagacgggagcgtagagggtagcgttttaaagtttttgaagtcgggtttagtttagggtttttttagggtttgagggagtatagatttcgttatattttagtttagcgtttttatagtagagggaaatagttaataagacgtgtaagtgattatgtattggacgacgaaggtttgtgtgtgtgttaatttttcgtaggaacgggaatggggaggaaggttggaaatttaggaaaaggtgttagcgggaaggttcgtagcggcgttcgcgagttcgcgcgtaggagttcgtaggattcgtttgtattcgtaggttcgtggtttttttggtttcgaatgttaaaatttgttaggtttattttggggggtttttttttaatttgttattaaaatttgtatttttttttgttttaaggtaaagtttcgatatttcgttaatttttagtttagtttcgggagttttggggattttggtatttttttagtttcgtttagaatcggaaaagttttcgggcgttttcgggttgaattttcgttagcgagttagtagtatttttttaagagtggagaggagggggtaggggttagtggaaggagagaggaggaggggacgagagagggggaaaggaagaagtaaggtagggaaaaaaatttatttatttttttttttcgttgtaaaattttaagagggtttgggagatttggttaatttttcgaaatatttgaatttttttattgtttttcgttttttttttcggttagttgtggggagggaggaaagagagagagggagagagagaggaagggggggggagggaggggaagagagagagaggagggagagagaggagagagatagagaaagaagagggggagagagagagaggtcggcgtggaggggaggagggagagcgagtaggtcgggtaaggagtgtatagttatagttttttcgtttttttaaatttttagttaaggcgcgcggtggcgttttcgcgttttcgttcgcgttttcgttcgtcgtttgcgtaagttaggtatgaatgttgagatttgcgttttttattgcgagtcgtcggtcgttgttatggacgtttattatagttcggtgtcgtagagtcgggagggttcgtcgttttttagggtatttttcggaggcgataagttcggtataatttttttgtcggtcgtcgttaaagtatagggattcggggacgttaagagtcgggttcgttacggcgttgggtagtaggatttggcgatatttttggagagtggagttggggcgcggggtttttttaataagttttagttttagtcgtcgatttcgtagttttagtcgtcgtcgtagtcgtagtcgtagtagtagtagtcgtagttttagtcgttcgcgtaatcgtatttttatttgtagcgaggcgtttgtaagacgttttcggacggtagttttaaattttaggaaggtagtagcggttatagcgcggttttgtaggttttttgttacggtgagtgtacgtgcgggttatttggtgttggggattacggggtgtttggttttcgtattttttgaaattggtggtttgcgggaggtatgagttggcgggttgggggcggggtggtgattttggtcggtaaacgggatcgatcgttgcgagggagttaagggatttgttttgttttttttttgttcgtcggtttaggtacggagcgtttcggttgttaaattcgatttggagtttgtttttttcggttttttcggtatttttttaaatcgttcgttttgcgttgttcgttgggcgggatttgaagcggatgttttttatcggtttagggcgtgcggcggtaaggagttttcgcgtagcgttttggcgttgggttgcggggttgcggggttgcggggttgcggggttgcggggttgcgaggttgcggggttgcggggttgcgggatagtaggattgtagaagtttcgtttttcgtcggttgggaggtttttcgggcggcgtcgtcgtaggtgagagcgtcgtaggtgcggagttaggcgggaagttcggagcgtggttggtcgaaagtttacgggaaatttaggcgtattggcgtaatatagtgcggagttagagattttagggttttaggggatattgtggtttggtaagattcgagttttgggattttgagcgttattggtagtggggatgcgggtaggttagtttttttggagtttttttttcggcgatttttggaggcggtaggtttttgaataatggtttaggatagagtaggaagggagataggaagtttcgagttttaggtggtttagagttgtggtaagagagaagggtttgggttttgatttgagtttacggggaattcgggggagttggtttaaatgatttttaagttgttttgaacgtagttataggaggtaggtttgggttttttagagtatagttattattgttcgggagagagagatatttaaggacgtttttagttagagtagtttagtagtttaggttttttttttttttagagaatcggggtttttgaattttaaagcggaaggggaagtaaagacgtagaaagggaaaaattttttttgggttaggagttttgagtatatattcggaggttttggtttttaggttcggttttggtgggaagagttgggggtagggaatttgttttgatttaggttgatggagaggtattaggtttggggatagaggttgggatacggcggaggttttggtggttagaataattttgggaaaatagtcgatggtagatattttttcgtatttaggtttttttttttataggcgtagaattagtttatagatggttgttgataaatatttatagttatatgtttgtttataattgtattttatatatatatacgtagagagtattttttttaggagtcgatgtggttatattttaagaatatatgtttatgtggtttcgaatgagttatatatttttaaatttataggatagaattgagagaagatttagaaagatttagtggtttttttttattttttttatttttttttttatttttagttggaatgagattaggtatttagattatagatttttaaggttttatatatagatatttatagttttatatgtaggtatatatagttttatatatagatatttattgttttatatatagatatttatagttttatatacggatatttatagttttatatacggatatatatagttttatatatggatatatatagttttatatatagatatatatagtttcgtatatggatatatatagtttttatataggtatttttttcgtgttaagttagtagagatttttagttttgttcgtattggttgttttttttagtttagggatgtaggttttagttcgtttttgttatttaggattattaggtgagggtaggtcgtagattaggggatttatggaggtttattttgtatagttagagagtttatgttttttttttattgtattgaatttttatattttaatgaaaattattagtgagatttttgaagaggttgatatattaggtaagaagagagtttaaggagttttttattttttggttaaatgtttttaggtttagagggaaggcggagaggtttggttttttttgagttttttttttgtgttttgttgggtttttatagttagtttggttttttttttatttgtattagtttttggagttgacggaaagggttagttatttgattcgttattgtttttaattcgtggtagtgtgatttgatagtaaatatttttttaaatttcggtttttttatttgtattttggggtgataatagaaaggttttattgggttataaatgtgtttttgtagagatagtaagaggtaagagtaagagttttcgttatttttgttttttttaatttttatttatatttttatttttatttattttcgagtcgttgggaattcgagagtatttaattttgaggatagggtaagtttttgttattgttttgggttataaattgtaggttgggattaaaggtagtttgtaattatcggtaggacgttattttatgttgtttaagatggaggtattgttcggggtaaagttataaataataaatagtaagttagtgtttgtttttttttttttttagtagttgagtttttttagttaggagatgtttggtttttttaggaaagggattaggcgcgttaggtttaagatggagaaattgaggatataaaagatgaggttttgtttttaatagaagtagttaggaggagggattttggagtgggatttttattttgttagtaagtaggaaaattgaggtatgtattgataacgatttttttttatagttgtgagagtgtatatatttaaaagcggagaaatggagtttaaggaaaaatttttagacgtttttaggagtattgggaaagtcggaggtaggggcggttttggtgttagtattggcgttggttgattttcgtttttaggtaggtagttgagatttggtaattatttttagttttggaggtcggggcgaaagttgtttttttacgtgtgtaattatatttaataaaagggggaagttcggaggtttttttttgggttttaatttttgggtttattttcggtagagtttaattgtttttcggtaaggaaggtgtttcgggtagttgagtttgggttaagtcgagggagtgcggggcggggaagtcgtttttagtttttgttggtcgggtttggatcgggttgcggaaagagttggtgagagaaattttttcgggttgtaagcgtttttattttaatttgggtttttttttttttaaatgtgttaaaagaacgacgattaaggcggtttcgtagtgttttttgggtgcggagatcgcgtttttacgaaagagtttttatcgagtttttttttgttgtaatttaagattttattatttttttttttagattttgggttcgttttttggttttttgaattttttgttcgagtttagggcgggtcgtttgggttataggagatatgtcgggttggagattcgacgttttttagcgacgtagagagtttttttgtatttagggtagggatttcggcgtttcgtttttaaatttcggattcgatcgtcggagttgtagtcggcgcgtattggttttagtttatttgtttcgagacgcggggtcgttgcgggaagttgtttttttttttttttttttttcgttttcgattcggtggcgataggtttttgttgaaagtagattgttattttttcgtttatttattcgtaaaagtagcgtttttagcgttaaggtttggggaggcgcgggttaggttggagtttttggggtgtcgtttaggggtttagtttcgatttttcgaattagatttagtggttaaatattagagggtatttattttttttgtatcgatataatttatgtattacgaaatgtgtaaattttgtcggggtcgtatttgaatttagttagagaattggggtgtgttttgtatataagagacgatttaaagaaggtagaaacgaaaattcgatagaagtagtaatagttgttgtgggtgattgtggggtgatcgtaggaaaattcgagtttgggattgaagtttgtttaggaaggggcgattgttgtttaattttggagggagggatggcgaaggaagatgtttttaattttttattttgttaatttttatagtttgttttattagtttggtttaaatataaaagttgttaaatagaaaaatagagggtttggattaaaatttaatattttaagttaatcgatttgtatgattttgtataattttttttttattataatttatatatagtgaagtgtttagttttgaggaggaaagttggaagaattgttatgtatgtgtatattgttagttaggacgattatttcgataaagaaatagattatttatatgtttttttaaacgttgtaaaacgttaaagtaaaaatattttttgtaagttgttttaagaaaattttagaagatatttcggagtatcggggattttattttgtttttgatagtagtgttttttgaatagggtgatattttagttagggtatttgcgcggtttcgattttaatgcgaagttttaagcggttgcgttaggaatttcgtcgcgatcgtcgggttaagtcggagttattaagttttgagtcgtacgcgttgcgacgtcggtacgtagtaggaaaatagattaaaacgttttatagaaaatttcggcgaagtttcggaggattttggtttttaagattagttgggcgtatttttttcgggacgtttttttttttcggttttagcgtttttttgtttttagtcgcgcgtagttttgttttggtggtaaattgaaataagaaatggaaatatattggtttttgttgttgttagggatgagaggttgttgacgttcggcgcgtttgttcgggtttcgggtttttttgtagatttttggattggggtgtttgaggttaggagaggagggggatagttgttcggagttttcgcggtttagaggttttgggatgatttatggggggggcgcgttttgttttggtgagtttttcgtttcgagggtaggcgaggtgggtgggtaggggagtgtatgtcggagagaagagagaacgtttaattagagagaattttttgttttcggagttttagcgtttttagttttttaaatttttgtttaggaagtcgaaggatttaggtttaggtaacggtttggggtggggcggtaagagcgtcgttttgtattcggacgtcgtttgttaggcgttatttggttatgtgcgttcgtagcgtagggtttttcggttattagtataggtttttatcgaggtgatagttatcggattgggaaattaatattgcgaggattcggttatgtgatgatatcgttcgggggaattcgagtggaagtcgatcgttttgtggtgttattagataggtgagaagtagtttttttaaatagggttttttgttggaaggaggaggtatttttttttagttagtgagtttttttagttgtaatcggggttttttttaatattagttatcgcggtttttagaggtgtagttcggtatattttttttttgtagatgtataaatcggggatatttttatttttatttaagatgttttttttttatttagtagaggggtgcggagtaaattcgggataataatttgcgtgttgtttggaagtaggttttttagaaaggatgataaaaatttggtgatgcggaagaagtttttattgtgtttaggaaagggtagcggttttttagttgtatcggttttggtttcggtttttatttttagtacgttttgttattttaataaagagcggtttttttatttgattttaattcgtattagttagcgtcgaggaaagagaggaatggaagggagttgtggtttagcggcgaggaagagttacgtagaggtaaggttttgaggagttaaggttggggtgtgtagggtggtatttagggtcgcggatcggttcggatttggattttagaggtagttggaagggttatcgtggcgtttcgcggtttttagggtgtcgttttggtgaggagggggttattgggagatacgggcggggtaagaggggttatcggttgttaagtatttatttttttcggtgaaggcgtcgtttgtattcgggatcgtttggttaaggttgttgggtattggcgtcgttgtatattgggggtagagagggagttagtgtttgttttatcggatttttaaagtagattttttaagagtggatttttattttgaattggaggtttagtatggatgttggttttacgtatttcgtagagggataggatttggtgatttaggttagagtagaataattggttttttagggttttgaaggttataatagagaaggttgggaagttgtgggaggtttggattatgatattgatgtttagcgcggtatacgtggggatcggggtttatagttgcggtgtagattattttagtttttatttttgtattttttatttttttatggttttggagaagtatgttttgtttcggggtttgaattttagttgtatgaaatgtaggagtgttgataatttttaaagatttttttggagtttttgtgttggtagtagtttgggtttatttttattttttttgttttttttttttatttttatacgtatttttgtttaggagaaattggggtaaggtgggtggaaaaggtttttttggaggttaatataggttttgagtggggagttattataggatataaagtcggttagaggttttatagggttatggtggaatgtaggttttgggtttaggattgggatgtaaatagggagggggtaagtaagtgtttttgtgattaggtttaagttgaggtttcgggtttatggtttttgtgtttatttattttttttattttagtatttatggagtattttttttgggcggatttttttttaggaggtagaatatgttaagtttttgttttttgtgttacggtttatgtttttttaagtgttttgtatagttgggtttaataaatgttcgttggttggaagaatgaatgaagaattggtgttttttgtagtgttgtttttatatggttaagtgtatttaggagttagtttaggtgtttgtgtgagcgtgtgtatagtatgaatgtgagcggtgtgtgtcgtgtttattttttttgggtttacgttttgttatttgagtgttttagggcgaggtcgagggtttgtgtgtagttcggtgaaaggtatgtttgttttttggtatttgtgtttgtgttttttagtgtgcgagttttaggtgtgtaagggtgagtattcgtgtgtacggttttggagtttttttgggtttgtgggtggtatagtttttgtttttagaggcgtttttagggagaatgattaagcgtttttgtattatggtttgtggtttttttgtttttggttatggtttttaggagtagttgatttatcgagtggtaggtagaatttttttgtggtaagttttcggtggggtttaattatttttcgcgttattttggggttttcgaatatggtttatttagtttatttatattgcggcgaggtcgtttgataagttattagttttggaatatattttttgtttcgtgtggtttattgcggaagagacgtgtttttggtattgtttgtgtttattgttgattttatttagtatatgagtaaattgaggtttaaggggaaatggatttttatagttaggttagtaggagggtaggaatttatcgagtttttttttttttattataatgggtggaaaggtagaaagtgttggggaatttaatttatttattcgtttttttgttggatgcgatttttgtaataagtttagtaagttgtattttttttgtgtattaaatagggtagatgtttgtagttttgttttagtttttttagaagtaaagtagatttcgttatgagtttttgggtattagaggatagtaggagagtattcgtggaatttttggtgggattgtagggatttgattttaatgtagttttattaggttgggatttttgttttttgtttagttttttaagttgggttttttttttttaagtttttgaaaattataagttagggttagttgaggttagatgattaattttttttattgtgtaggattgtttattaggttttgagggtttttggttatatcgaggaaattggtattttttttgattttgtagtatatatataatgggttatggtgatatgttggggggttttatttaaggttggaagagatggtagttattttttggtttatatgttttattttatagataaaggggattgagaggtttgattttatttacgtaaggtttattaaattttgtttgttattatgttaagttttgtggggtattttgggaagttttggatgtagtttttgtttttaggtttagaggtagagatagataagtgattttgaaattttagtttagtgggatgggttttgagatggggaaagttttgatttaggttttgaggagaaggttaggttggtttgttttggggcgtgtaggcgttattagggtttggtagtttattggaagttatttaaggggagggtgtaggaaagttgggggaagttgggatttgtttaggttaatgagttttttttagtggttggaaattttgaggtttttttttttttgattttttttttttttttttttatgtttttttttggtttttttatggaaatagttatgtataatagtttttttatttttttagtgttattttatttttttttgtgttgaatggtattttggttttgttttatttgggaggggagtatgaggaggatgtgatgatggagagaggtagtgtgtttgtttcgtatattttgtattattaggttttttgttttattttttatattatattttttgagggtgttaggatattgtaaatgatagtggtggggttttgattaggttttagagtgtgtatgtagagtttggggtttttttggatatgtgagttttttcgatgtttttatgtggttataaggatttatttatatttggtttatattttagtatggagatgggataattttagttttatggtttttgattttaaggagggagtttatttttaaatggggaagataaatatgtatatagttttattgtatggtttttttgttgtggttttagtttttttatttttgaattttttttatgggatttagtggttttagaggttttggggttttgtgatatttattaagaggggtgaattggttttttagaatttttaagatgttttaggattttatatttttttttatttattgtattaggaaagggggaaggttggtttagtttgttaaaggttaagagtttgggatgttaggtttggtttttggtttgagtttttttatttataggatagagataataatgggttttaaggtaaagaaggtttagagttggttgttgttgtagaattatgagatagtttagaataattgagcgtttttgtttgtgcgttaggtagtatattagtgttgtttatgtatgattttatttaattattattataattttatgagattggtattattattatttttatttcgtggatgaaaattgaggtttatggaagataagtaattcgtttatagtgagatagttaggaaggaagagtcgagttttgttggtcgagggttttaagaaatttaaaaggtattttgttttagaatgattttgattagatttgagataattttaattttattttagatgatgtggagatgaaagatagggttttataaatatggtttttagggtacggtgtagtggtttatgttcgtaattttagtattttgggaggtttaggcgggcggattataaagttaggagattgagattattttggttaatacggtgaaattttgtttttattaaaaatataaaaaattagtcgggcgtggtggcgggcgtttgtagttttagttatttgggagattgaggtaggagaatggtgtgaattcgggaggcggagtttgtagtgagtcgagattttgttattgtattttagtttgggtgatagagtaagatttattttataaaaaaaaaaaaaaaaaaaaaaattatggtttttaaagcgttttttttagttttataatcggggatgtagaagataagtagtgttaggagtaaatttcggtatttgttaggttgaagttttatatttgattttgtgattttgggtatagtttttttatttgtattaggtgaaaatagtgttttaggtatggtatagggttttatagttggtatgaggaatgattgtatgagtttttagaagttttaggaatatgagagaatttttgattaaggtagggtggagttgaggagtatttgtgggaatagtgttttttaggaaatatgagagatcgtaggaggttttgtttgttttgattttaattttttttagagtttggagttagtttatatagtagatgtttaataaatgtttgttgttgagtgaatgaatgaagggattttataggaggggaatatgttaggaattttgtaagtttttttatttttttttcgtttattttttttttgaatggaggtttggggtgagagtttgttttgtcgtttttttgtattttggtagaaaattattgatttttttttttttgtagggttttttgtggggtgtaggagtagcgaggttttgggtagttttatttagtataagttttggttttttttaattttagtagtcggaggagtattttttttttttattgttttttttttgggttttattttattggttataggtttgcggtttgattgttatagttttcggggtcggttttagttaaatggttttttttttttatttttaatttttttttttaggttttttttattttttatagtgagtttcgtgttttgttcgttggtatttttatttttgttatttgtttagggtgttgtttgagagttgttgaggttttttttttagttttttatttatttattttttattttgggattttgagatttatttgtaagggatgtagtttttttttttggttaggatgttatttgattttattcgggtttttagtagggtattcggttttaaggtttgggttttttttagtatatttatgatttcgtttattcgttttatttcggtatatgtaatttgagggtatttgaatatttatggttttttgagttttattaaaggtttaggtggaggaattgaatttttattttatagatggaagttaaagtttaaagagggggaatagtttagaaggaatgtatggaggagtgtgcgtttggtaaaagtttttttttatatttaatagattttttagtttggtatttttgtgttaggtagggattagagtgtttggtagtgaatgaattggtttttgtttttagagagtttatagtttggttagaatgtgttatatgttatgggaatttttagggaaggtgaatggattggggttttttgagtatggatattcgaagtggattttgaaagttgaataggagtttattagttgaaggagatgaaagaggttttttagatttaggaaatagtataaattaagttttcgggtaagggaagaatatgaagtaagtgtgtggagtgtaggggtatgatgtatgtcggtgaggtgggttgaggaatggtaggggtatagttgaagagagttttttattttattttattttattttattattttttgagataaggttttattcggttatttaggttggagtgtagtggcgtaattttagtttattgtaatttttgttttttaggtttaagtgatttttttattttagttttttaagtagttgggattataggttcgttattacgtttagttaatttttgtatttttagtagagatagggtttttttatgttgtttaggttggttttgaatttttagatttaagtgattttttcgttttagttttttaaattgttgggattataagtataagttatcgcgtttggtttttgggttatttattttttattaaagggtttagattttggggaagttattggagggttttgagtaaaatagtgagattttaggttgagtgttttttgtatggtttagtatggtttttgttttttgtatttaaaatttttattttaattaagaatgaattttttattgtggtaaaatatatatagtataaaatgttattattttaatatttataagtgaattttttagtggtattaagtatatttataatattgtgtaattattattattgtttttagaatttttttattattttaaatagaaattttatatttattaaacgggaatcgttattatatttttgattttttatttaagtgatttttattttattttttttttgtggatttttttattgtaggtattttttttttttttttttttttttgagatagagttttatttttgttgtttaggttggaatgaaatggtgtaattttagtttattgtaatttttatttttcgggtttaagcgatttttttgttttagttttttaagtagttgggattataggtatttattattatatttgtttaatttttgtgtttttagtagagatggggttttgttatattggttaggttggttttgaatttttgattttaggtgatttattcgttttagttttttaaagtgttgggattataggtgtgagttatcgtatttggttttaggtattttttataggtggaattatatagtatttttttttggcgtttggttatttgtgtattttttttggagaagtgtatttaagtattttgtttatttttgaatggggttgtttgtttttttgttttttagttataggaattttggatattaatttttttttagatatatgatttgcgaatatttttttttattttatggattgtttttttattttttggatattgttttttgatgtatagaagttttatattttgatgaagaagtataattttttaatttttttattttgttgtttgtgtttttggtgttatatttaagaaatcgttaataattttagtgttaggaggattttcgtttatgtttttttttaagagttttatagtttagtttttaggtttaggtttttgatgattttaattttgaatatgacgtaatataaggttttttaattttatttttttttatggggatatttattttttttagtattatttgtagaaaagatggttttttttttatcgatcggttttgggatttttgttgaaaattaattgcgtatgtatttgagagtttatatttggtttttattttgttgtatttgtttatttggtttttgaatgattttttgatgtgaagtttaggattgtagaatgtataaggatttttgtaggttattcgtttatttttttgtttgtaggttagtgattaataggttatagaaatttagtttaaggatatatttgtttttcgggatttggagttggtgagaaggggtggagggtagagttaaaggcgaggattttagagttatagttttggttttggttaggtttttggatattcgggggtttttttgtttttttagttgattattttatgaggacgtggtttttggggaaatttttttgtgttttgagggtttatatatttattttttgagatgcgtatatttgggattattttttttattaagatgattttagaatttttttagcggagtttggaggagttttaagaaggaagtatttagtggttttatgttgttggttttatgtatattttgaagattttttgttagatttttaaaagaggtatttgtaattttttgttttttattttaggttatttagtgaatggtataattaggggttggggttttagggattagatagtagagtttaaggggagtatagttgtagagaagtagttgttttcggtttttttttttaggaattttttcggtttaggtgattaaatagaggtttgtttgagtttggttttttagttatgtgttttaaggtataatttttagggtttttggaaaattatggaaattgtttattttataattgtgttatataggttgtttgatgttttagatgtttttggtttggagaagtttatgaagtttaggatttggaaatagattttagtttatatagttgagtgattttgggtaaattagttgatttttttgttttagtttttttatttgtaaagtggggataagaattatgtttatttgttagtgatagggtgaggtttaaataaggtaaaataggtaaggataaagttaggtgtggttgtttatatttgtaattttagtattttgggaggtcgaggtaggtggattgtttgaggttaggagtttgagattagtttggttaatatagtgaaattttgtttttattaaaaatataaaaaattagttgggcgtggtggtgggcgtttgtaattttagttattagggaggttgaggtaggagaattatttgaatttaggaggtagaggttgtagtgagtcgagattatattattgtattttagtttgggtaagaagagcgaaattttgtttttaaataaataaataaataaataaataaataaataaataggtaaggattttagaatagtttttggagtatagtaagtgtttagttaatgttagttgttatgattgataagattttgttggaattttgattttattagattggtcggaaattttgataggtagttaaagttgattgggatgtatagagttggaaaatgaagaaattattattgaatttatgattattgtgtggttgatattgttttttaaaatatggatgagtgatgggaggggcgggggttgttatttttatttaacgtagcgggggtaggttttaaggagggataaaggttatttaggttttttaggttttttttttttataggttgttgtatttcgtatatatgtgttatgagttggggaataattttttttttgttgaatgtgttttttgtgtttatttgatttagaattttagtttgtttttagggtaggggttttgttgtgtttttttttgattagtatagggttgagtatagagaatcgggtttagggaatgttaggtaatttttgtattttttttgggttttagttttttgggttttatttgtaattaagaaagtatttggtgggtattgtttttggttatatttggattgagattttttgtggaaatttattgggagatattagtatttttaatttgaagatgaggaaggtgaggttgtttcgttgtgaattgaatttagattttttgaagttaaagagtttttttttttttttgtttagggggtttatgtttattgtttggatgtttttatgtttatgtgtttattagatttgattagtatgtgagagttttgtagacggtggagggggtgtattgggaggggtttttagtatattgtatgttgtacgtgggttatattattttcgtttatttattgaaatgatgattatgttttttgatcgtttagatattatttttttttttttttagagttattttgagaattaggttagtttagtttaggatttttatgtgatatgtgggagtagtttttgtgggtaaagaaggaggagataaatttttttaaatagaacgagtaatagtttttttattagtttagtgttggcgaagttaggggtaagaggttagtttggaaatattatttgtattatgtggtaggtggatagtgagggttaggtttttttagggaatgtatgtgtttaagttttgttgtattaatgtattttttaggatttagttttatgagagaagattttatagagtttagttttgtgttatataaagtatttttttaggagatttatttcgttgtaggggatttattttgttaagaagtagtaataggtggaaaagagatgtatttgttttacgttcgttgtggattaaggtttgtttggtagaagggatatattatgtattatatatatatttttttttttttttttaagatggggttttgttatgttggttaggttggtttcgaatttttgattttaggtgattcgtttattttagttttttaaagtgttgggattataagtgtgagatattgtatttggttatattatgtattttaaagaagagatttttttgaattttttattttgtttagatgagtagaagttaatgaaaaaattatttttttttttttttttttttttttttttttttttttttgtttgtttgttttttttttttttttttttttttttttttttttttttttttttttttttttttttttttttttttttttttttttagatagggttttattattatttaggttggaatttaatggttaaattatggtttattgtagttataattttttgggtttaagtagtttttttgttttagttttttgagtagttgggattataggtttgtgttattacgtttagttaatttaaaaattttttttatagagatgggggttttattgtgttgtttaggttggttttaaatttttgagtttaggtagtttgtttacgttggttttttaaagtgttgggattataggtatgagttattatgcggggttaaaagaattatttttaattaatatgttaattgtgaatgttgaaatattgattatttatattttatttttattatatgtgataggtaaaattttgggaatttatttattttaaattttagttatttatataaaaatattaattaaaatttttaggtataattattttttagatattttgaattgttaattattttatagttgtaaatgtggattttttaaaaagtaaatattgaagaattttttttatttttattaattttaaggaagttgatgatttttttaaagtataaattaggattgggtatggtggtttatgtttgtattttagtattttgggaggttgaggtgagataattgtttgaatttaggagtttgagattagtttgggtaatatagtgatatttcgtttttataaaaaaaaaaaaaaaaaaaaaaatttaattagttagttgtgatgttgtgtgtttatagtattagttatttaggaggttgaggagggaggattgtttgagtttaggaggttgaggttgtagtgagttgtgattgtattattgtgttttagtttaggtaatagaaaaaaaaaaagtaattttataattaattgagttattatttttttttttttatttaaggggagaaaagttttgttgtttttttagtttgtaagtgattttttagattggaatgagtatatttgggttaggcgaggtggtttatatttgtaattttagtattttgggaggtcgaggagggtggatttcgaggttaggagtttaagattagtttggttaagatggtgaaattttatttttattaaaagtataaaaattagttaggtgtagtgattagtgttggtaattttagttattcgggaggttgaggtagaagaatggtttgaatttggggggtagaggttgtagttagtcgagatggtattaatgtattttagtttgggtgatagagcgagatttcgtttttataaataaatatataaataaaaattaaagaaggagtatatttgagaaagaaaagatttgatgttggtgaaagtagtatattttttttgggattatatgttgtttttgtaggttaagaaatttaattgtttggttaggcgtaatggtttatgtttgtaattttagtatttcgggaggttgaggcgggcggattgtttgagtttatgagtttaagattagtcgggataataagagtgaaattttgtttttattaaaatataaaaagttaggtgtggcggtatgtgtttgtagttttagttatacggaaggttgaggtaggagaatcgtttgaatttagaaggcggaggttgtagtgagtcgagatcgtattattgtattttagtttgggtagtagagtaagattttgtttttaaaaaaagaaagaaagaaagaaagaaatttaattgtttaagattagtttaatttagtacgtatttgggtgttagatagtgataataggtagggcgagtgataacgttgtttcgtaatattttttttttgtttttggtgagggtatagtttaaaggtagaggttgtcgtgaatttattttttaaaagtttttttaagtttatataattaaataaatttaatatttgatttttatagtagttgttaatgttttattttatttatagtttttgttatatgtatgtgaaatgggttttttattgaaagggattttgggagttatttttgatagaggtttatggtttataaatgttattttgggagttgtcgttcgggaaatttgaattggagaggatgtatttggggaaggaagtaggtgggggtgatatagttgtaggttgagtaacgttgttttggttgttagttgttacggttaaatttatttttagattataattgtgttaatatattatggtaacgttttattgatagagtgggtgtcgtgtgtgggttaggggatatgtcgttttgtattttattttagttagattttatagttattttgggatgtggatgtttttagttttattttatagatgaggaaattgaagtatataaaggttaagttatttttttaaggatatttttttgtggtagaattataaggtggtttgggagtttttttaataattttttttagtcggtttttattttttttatggggaaaattggtattttttagttttatgtgaagcgttagttaaatatagttttaatagatttttttaataatattgttgttttaaaatattttttttatagagatttggagtcgttttaaggttgggttaggtgtttttgttttggttattattttgtattgtaattatggtttttgttattgaggcgagttatttgaaggaagggattgtgttttattgggttttatatttttattatttggaattttgtttagtgtatagttggtgttttaggaatgttgttgaatgaattaatgtagtaaataagtggtagagttaggggttaagtttaggtttgttttattttaaagattttttaattattttattttgtttcgtgtaggatttaagtttttttatttcgttagtttttggatgaaagtgatattatagtgttttggtgaaggtggtggagttgtaggattttttttgttatagaagggaaatagaggtttgggggaattaagtgagagatgttttgggatacgtttagggttatatggtttagggggtttgagagggataatgggtagatagattatagggttggatgtaggaggtgtagggtttaagttttggtttttttattattaggtagtatgattttgttttgggttttcgtattttggttgtgaagggagggtttggtttagtggggtttttgaattttgcggacgtattgttgggataggggagagtatgggagattttgtttttttggtagtgggttttgtcggggatagggttttatttaattatttacgttatgagatggagtttggggatgggacgaggagtcgggaaatttttagtttttttgaggagagaagttgataggggtatttagagtttagattgaagttggaatatttattttattttaggaggtattaggaagtgatttttaagtgttagattatatatgggttttttatggagattttgaagtttggtttattttagttttttgagatagaaatgattttagtggtttagtaatgtttttttagaataaaatgaagtttgtttgatttttttatgttagaaagataatttattattattttgaaaggtagtggatttggtatgggattatttagtttgttttttttagttatgtgattttgagtaagttatttatttttattggattttagtttttttatttgtgaaatagagatattaatattgattttatgggatttggggagggttagaggagatagtgggtgggttagggtaatacgaatataaggtattatattattgttgttatggttgtaattagttttggttggagagtttttgtttaaggagtttggtaatttgggatttgttttatttggggtgaggggatggtattttggtattttgttttattataaaatgtaatatgttttgtcgagttttttttgattggtaatatttaatttaagagttattttattgtagaggtttttttcgatttttttaattaaaattgatcgtttttttttgtgggttttgtcgtgtttgggaaataagatttttgttttggggattttggaatatttgatcgtgtttgttttttatgtattttttttattaggttatgatttttaagggaagttttgaatgaattagtaaggtaagatatagggtgggggagagaataggaaagataaattttagatataagttgggggatggaggggatttaggttttggtagaggggttatgggggttgagggttggataaagtttagggttttttttttttattattttttttttttatataaggaaattttatttatttggattaattgtaggatagttgaaattatagtagatttaaaaattaaagtattttttaaatttttaagttttaatagtagtttgattttggttttttatagtttttagaagagttgtttaaaggagttttatgttttaattgggttatagtggtttttacgggagtgagggtttttagagggttggggagtaatgtgtgtttttagagttggtatttgttttgtgatttttattgtaacgtataaggttttttgtagaattatgaatggtggtggtgatgaggggaaggcggggaggttgttaggtaaatttatttaggttttgtttaaatgattatatatgttagttttataagaggggtttttagggaaggtgttttttttttattagtttatatatttttttttttaaaaatttttttattttgatatagtattatatttaaagttataagtggattataaagaatttttagatgttttttatgttgattttttaaatggtgatgttttgttatatttgtattatttttaatttttttgggtttttttttgtgtttttttttgtgtatatgttttgtttatgtatgtattgatatatatgtatacgatatatagttgtattatttaatagtaagttgtaggttgggcgtagtggtttatgtttgtaattttagtattttgggaggtcgaggaaggtggattatttgaggttaggagttcgagattagtttggttaatatagggaattatttgaattcgggaggtagaggttgtagttagttaagattgtgttattgtattttagtttgggtaatagagtaagattttgtttaaaaataaataaataaaaaaagagtaagttgtagatatatgatttatatgtttttttgtttttaagtattttagtgtgtgtaggttttgaaataaggtattggtttatatttgaggttttagatggttaatgaagttgatttttagtagagtagtttgattaggggtagttttgaaggttgttgtaagggggttaattttttgaggtagttgagagtagttatttttttgtgattttttttttttttttttgattttgttttttgtttgtttgttttagttttatttatagtatttattttaggagggtttagtaggtatgttttaggtatgagatttaagttttagttttgttttttattagttttttgttttttttttttttttttttttttttttttgagataggtttttgtttttgttatttaggttagatggaattttggggttaagtgatttttttatttcggttttttaaaatgttgggattataggtatgaattattatttttggatttttttaatagttattgatttttagtaaggtatttattttttttggttttagtttttggggttataaaatggaaatttggcggttgtaaagaggttggaattttattggtggtataatagatgttttagtattttgtaaagtataaagtttagtttttggttttgtttagtttgtttgtttgttttttgtttttgcgagagtttagtattaattttttttcgtttttggattttgggaagtttattttatttttagattaagagaaaaatagttttttttatttatttttgttattgtaggaagaattgagagagtttttgtgtgagggcggagtagtggaggacggggtggtagattttgtttcggcggatgtttgtttcgggaagaatttacggggaagttggtaataagtttgttagttatatggaaagtcgttgggttaaacgataggggtgttttagggagtttttgtaaggtaaaggtttttgtaagttagttagttttttgagtatttattgtgcgttattttttttggagggttaaggaatttttatgggtttttaaagggaggttatttaaggaatgaaaaagagtttaggttttagtttgtttgttatttagttattagtgatattggtgggttttttttttcggcgttttattttgatcgtttgtttaatgaggatgttggggttatagtgtgggaattttgaggagattggaatgaggtaggaatgtgaaaatatttagaattaggggaggaaagatttttgtaaggaaggttagcgattcgttttatttatttttttgttttttgtagtgttggaatggtggtagacgcgtagtagggttgaattattgtttgagtggtaaatttttttagttaggatttgggtttttaaataaacgtttagaaattttattaggtattggggttttaggattattatttttcgtttagtgattttattggaattgtagtgttttttggtggttagtatgtataattgtagttttgattttggtttgttgggagttgggttttggaatttgaatgtttagttttttgggtaagtagttagggtcggggatttttttttagttttggttttttatagggttgtgtttttttattttttttttttatatttttttttggtaggaatttatgtaatgttgttgagttgagtaaatagaaggtaagaggtttgtttagggttagggagttgtcggggttatttttggttttttttgttttgcgttgtggttggttttttcgattttttttattttgaaaggttttttttttcgattttatgtagtagttttttgatataagtagtgtgtgtaggggattaaggattttttgtgtttggagtttagttttagggtttggggtttttttttgtagatatattggttatttttagttgtgtttgtagagttgttttagttaaattagaggtagaaggagtttagaggagttttttttaatttaggtatatataggtatttgtattaattttaggggtgtgttttgagtttttatttatacgaggtttaggttttagtagtatatttgggaggtttattttgattagtttatagtttagggagggagtaggtttatgagtcggtgttgtaaagtaggggatttagtgtttaagaggtaagggaggttttggaggaagaagggtggtttttggttgagttttgaaagtttaggagagggaatttatagtagaagaaaataaaaaataaaatgttttatagttaaaaaataaaaaaaaaaaaaggaaagataagattttatttttatttatcgtgttggtaaagattttaaaaatattataatgattattattggttttgaagtgggaggggatatcgtggtagttgaggatattatatgtttttggaagataatttggtcgtgttttttagagatttttagatatgtggataattgaattttatatttttagtttttggagttttttttaagggaatcgttatgtatgtattgagagatttaaattatagatttgttatgattttaaataagtagaaatttgtgagtttaatagaaaaggatggattaaataaaatagtgattgttttcgttacgtaattattaaggatggtgtggtagaagaatatagaatagtatggaaaggggtacggaatatggttagattttattaaaatgtttataggttgggtacggtggtttacgtttgtaattttagtattttgggaggtttaggaaggtagattatttgaggttaggagttcgagattagtttggttaatatggcgaaattttgtttttattaagagtataaaaattagtcgggcgtggtgttgggtgtttgtaattttagttatttaggaggttgcggtaggagaatagtttgaatcggggaggcggaggttgtattgagttaagagtgtattattgtattttagtttgggcgataatagcgagattttattttaaaaaaaaatataaaagtttataaagtaatgttttttttgtgtgtgtttgtgtgtgtgtgtgtatgtgtatgtgtgtgagtgatttttttttggtttgttttgatttttttttaattttttatatagaatatagattatatttgtaatgcgaaagaaaagttataaaagttatagagaaagttatttaggtgaaagtagtagttagttatagataggagaggtagagagatatgttaggtagaaggaagggtgttcgtaggagtgcggaagtttgaagatattcgtgtagtgcgttgtagagcggaagtaggtttttgaattttaagttagatggaaggttggcgtgtaagttcgtgagtttggtggggattagttttgttttcgggattttgaatgttatataagtttgatgtatagggttggtagatttagtaaaaagtaagtaagtaaataataaaattaggttatttagttaaatttgtatttgaataatgaataatttgtaggataaaagtattttttgtgttatatttgggatatatttatattgtttaaagtgttaattgtttatttaaaattttagtttaattgagtttttttaagtggtgtttgttttttgttttttataattttatagtatagagtttagttcgtttttagagtatgtattatttaggattttaattattgtttttagatattttaatttgtttttgggaaaataaatagaaaattaatttagattagtttcgtttcgttttttaaaaaaagaaaagaaataaaattaatttatagatttatattgttatttttggaaatttgtagtattttttgaggataaatgttttattttttttttttttttgattaaaatgagatttatttgatataaattgaatatttttgtatgtgttaaaacgttatttttttttagtattattttatttatttgtttattaaatgtttattgagtatttattgtatgttagttatgatattaggtgttatatagtagggtaaataaagtatatatgtttagatatattttttgttttatgggagggagagagagagagataataaataaggggaaaatagaagaataaataaatatttaatattggcgcggtggtttatgtttgtaattttagtattttgggagattaagacgggtggattatttgaggttaggagtttaagattagtttgggtaatatgaggaaatttcgtttttattaaaaatataaaaatgagcggggtgtggtggtttatgtttgtagttttggttatttaggaggtcgaggttcgataatcgtttgaatttaggaggtgaggttgtagtgagtcgagatcgaattattgtattttagtttgggtggtaaagcgagattttgttttaaaaaaagaaataacgtgtagaataaagattattaggaaggattttttatttatggaaatattattttttatttaattaattttttattgttgaatattttgattattgtcggtttttttatatattaaattatgatatgatgaacgttttttttagtgaatgtttattattatttattgagtaaatttttagaagtgagatttttgggtgaaggtatataaatttttaatttagtttttgttttatatatatgaatataattttgtattttttttttagttatattttttaaaatttgaaaataatatgttgtaaattttttttttttttttttgagatggagttttgtttttgttgtttaggttaaagtgtaatggtatgattttagtttagtgtaatttgtatttttcgtgtttaagcgatttttttgttttatttttttaagtagttgggattataggtggttgttattatgttcgacgaatttttgtatttttagtagagatggggttttatcgtgttggttaggttggttttaaatttttgattttaggtgatttattattcgtttttgttttttaaagtgttaagattataggcgtaagttattacgtttagttgtaaaaaattttttggtatatatttttatgagttttaatatatttatgtatagatttatgtatttattgttatagttaggatatagaatagttttattatattagtgtaagttttttgtaaataaattttttttttttttttatatttggtaattagtgatttgttgtttagagttttcgtagttttgttttttttagaatttatgtgttagttgagtgtagttgtattttatgtaaatttgagattggttttgtttatagattttaaggttattttttagatttatttatgttattgttaatagttttttttttttattgtggagtcgatttatggtttggatagattatagtttgcgtttttatttttttgttaaaggatatttgggggtgtttttatttcggggtgattttgaatagagttgttgtagatatttgtttatgggtttgggtttttttttttttaaaataagttattatttttgtagggtaaatatttaggagtgggattgttgggttatgaggttagtgttagtttaattagataagatatcgtttaagtgtttgtattgtgatggatgggagtttcgggtgttttatatatcgtcgtaatttggtattattaggttttatttttattgtgataggtatatagtggtattttattgtgtttttaatttgtatttttatagtgggtaatgaggttgagtatattttatgtttatttgttttttgtagatttttttgggtgaagtgtttgttagaatattttgtttattttttgttaaatattattattaattatattttatattttatttagattttattggttttttttaatgtttttttattgttttagtattttttttagaatatattgattatatttagtttttatggttttttggttttttttagtttggggtagttttttagattttttttatttcgagagtattttagggtttgggttggtggttgtgggtgagtaggatggtttgtgttattggttagtttgaggattgttatttttattttattttttgttgaagattggtagttttttgagggtcgggatattgtttgtttttgtaaatagttgtgtttcgtgtatgtgtgttgaaatttaagtttagttattattatttttttggtattatttattgggattggagttaaattagggatatttaagttgagttttggatagattttagtgttagatgaggtggggtggggacgtgattaatggttaaattttaattttcgtttttatttttataggatcgtttggatagtagtgggtttagttagtgtttttttaatagtatgaaagggttttatgttggtttgttttttttaaggagattatatcggtgtgtgtatttcgttatagggtgtgtggggttagtttattcgagaatagagtaagcggtatgttttttataaagtagatgtttggaggaaaaatagatgtaattaaaattatggaggataaaatgattgagattttttagcgttatatgtatgggtttgtgtacggttttatataggtttatattatttatgtttatatttatttacgcggatttgtatttatatataattgtttacggggatatatattttatttgtgtgtttgcgtttgattatataagtatgtatattttataaatttatttataagtaattatatatatgttttttatatttatttataatggtagatttgtgttataggttttcgggtgtatatttgtatatatagatgttattagtattttttttttaaaatggttttagaaggttattttttaaattacggttaaaaaaaaaaagaaagaaagaaaaaagaaaaattagttatttttggaaattttttaagggtttttttgttttaaaaaggtaaaattagattagagtgatgttattgggttgaattaggatagatgggtagaggttaagggaacgaagtaaggttttttattttatgtatttttttagttgaaatttaatagttaggggtttttagtattagaaacgatagtttttagtggtacgggggtttttttagggggagttttagtagaggttgaagggtttagtggttttcgattgagaatataattttgaattgaatgttttttattttattaaaagtagtttatggtaataatgttgatttaggattgtttgaagagtattggatattatgatggttatattgcgtgtataatatttttcgtggagtaggtattgtttttagtgatgtaggtttattatttgattgatggttttaagtagttaggggtttatttttagattaagattgggaagttgtagattgggattatattgttttggattttatagttttagttttgggataaatttattatgggaggggtattagtatagagttttttcgggtttataaggagttgttttagggaggatgtgagaagtttaatttttggcgggtggtttggatttacgttgggcgttgttgttgtttagttttatgttagtacgaggtgttttaaggttttgaagaaggtttgtttagtatttaggtaaattgagagttttttggcggttttttttattttagtgtggtggtagggtgggtgtggagttagtttttggtagattttggattgggtttttggattttggttttaattttggagtcgtttttatgaagttcgtttttgtttttttttttgttttttgttttttgtatggagatatcgtttaaggtttgtttgggtttttttttttttttgtttttcgtagtgatttttgttgtttgtgttgttagttttgaatggtggtattcgttattgcgtgtttttttttaatgtattttattcgattttttttttagtgggtaggaggatgaggcggttggtttatttattcgagagatattttttgtatatgttttatagaatatcggtttattaaaggtgtatatagatatttggatagagcgagagtttagtgatgtttgttagttagaaattgtttatttattttttagtaattttttattgtatttttgttatttgatttattttgtgttgagttttaggttgagaagggataaacggtatgaggttttagtttttggggaattgatattttataggaggagttggatattcggggtttgatgagattacgagttagtaaatataggtagttagtggagagggtgagtagaggatggaaaatagttataatttgggagggttttttggaggagtattggattttggaggttagttggaaggaggaatatgttaggtaggggttcgagatggggatttgggggattaaggttagtggttttttttggttaggagtagttagtttgagttatgggatttttatttttagtagtcgttttgttgaggagggtattttgcggggagttagatttgattagtatttaggtttttagttattatgttgatattttagttagttcggggttatttttttggagagtaatttgttggttttgtttagggtttagttttattttttatattatttttgttattttttgttttatataggtcggagaaatttagggttattcgaggaatagtagtgggaattgtagaaggaagggagatttagaggggtggtagtagttttttaatgttcgtagggatagggttgttatggggaagggcgttggggggttagaattggaattagtgaattagatttataggagatagatatgggttgggtttaaagatgagtagttttgttgttttgggggtagtgagttttttgttattttagattggaattagcgttaggtggagatgttgtagggtggcgagaggtggatatagatagtttgagtttggggttttaggatttagattttgagagggttgtgtttgttattttgattagttgagtggagttgtagaattttagggaatttttttttgttgtttaaatgaggaatttagttttagaatttaaagtaagttgatttaagataggttagaaggtttgttttttttttttttgaggaattaggagtagcgtttttttgaattttttttatttttgatataggtatattttttttttttttttttttttttaggtttttagggatagttttggttgttggtgagtaagggaggagggatttttaattatttcgttttttttatttgtaggtgagattttagagatgaaatgggttatttgaagttttgagaagagcgggggtcgaggttagggtttttaatttttggtttggtggttttcgtatattttgtgttatttttatttttgtttgtttatttggttttagtgggtagttggaggtgggtaaaattggatttttatttgttattatgaagattggattttttgttattttttttgaaaggttaagagttggtttagtgttgagaggttgtttttaggtcgtatttttatttttttatttttaagggttggttttgttttttataagatggatagagtaggacgttttggttatatgaggtttttgggttttttttgtttttatttttttttttgggaataaggtttaagatcgtaggggagggagtagagggtaggttaggagttgagaggttgtgttttgttcggaattggggtatgtttttttttttttttggttttagtttttttttagttaaaattaggagtttaggttggtttatattaatttttagtttttgtaatatggagtttttattgttgtgtagggtggttttaatttttagtaagcgtttatggggttgtgagatggggtttggggattagagtttagggtttagtgtttattttttttagttttttatttggtttttaggaagttgtaaaatagggatggttatttttgtgaggttgggtggggtttttaaaaaaaaaaaaaaaaaatttaaaatataaaatgtatttgtttgttaggaagataaatatttttgttgaaagtttttggtttagttgttagttgtagtttgtagaatgttgttattgaagttatggttgtttgtatgtgtttgggtttatataggtgttatgcgtgatgtcgttgggtcggtcgtgtatttttatggcgtttgtattgttagtggtttttaggagtagttttttgaagttgtttttaggtttattttgggtatttatttttatgttttttttttgatgttttggagagggaggcgagaatgttataggttaaatgttttttttagtttttttagtgtgtatagaaagttaggaatgagacgagtttgaagttttagtttttaggatttggatggagttagaagatttggattagaggtattattttgatatttaatgtttatcgtttggatttatttttagaagaagaaatcgcgggttagagtggttgatgtttatatttattatacgtgtttgttgtgatgattaaagttcgtgtacgtgaaaggtcgtgttaaatgttttttaaacgttttattaattgtgtttgtttttttatttaataagttttttttttttaagttatagataaggaatatagttttcgaggagtttatatttatatttgtagatatttagttggttgtttttttttaggtatttgtgtacgttttgtatatgtttttgtgtttaagggtttgtatgtttggaggatttttttagggtcggagttttttaatgtttatagggtttgtgggtttgtaagtttagattagaaatgtgaatattaataatggtaaaattatatagttagtatattagtttttttattttttatagttattttatgaggaagattttagaagtatttttatttttattttatagagggggaaattgaggtatatagcgggtaggtaagtttttttgagtatatagttggggagttatggttataggatttatggcggggttattaagagtttatgatttaaattaggggtttttagtttttaggttgtggattagtatcgatttatggtttgttagtaatcgggtcgtatataggaggtgagcggtaggtgagtaagtattattgtaagttttggtttttgttagattagcggtgttattagatttttatagaggcgtgaattttattgtgaattatgtatgtgagggatttaggttgcgtgttttttaagagaatttgatgtttgatgatttgaggtggaatagttttatttttaaattatgttttattataattttttttatttatggaaaaaattattttttataaaattagtttttggtgttaaaaaggtagggattgttgttttaaattttttgttaggaggtgagtgtgtttgtttaggaagtttattaggttgtgtggtggtaaagtggttttttgttttatttttttattttagtttttatttttttttttttgatgtgtatgggttgattcgtttttgtagttttgagttaggaatgtgtcggtgggtggggggtttatttgttagacgtagtggttgggagttgtgtttatgtatatttatttaggttcggggttagcgtgttggggatgaaggtgttcgggtagttttagtaaatagtgggtaggagttgtttgtaataggaaatgtggtttatgttttaattttatgtatttttaaggaagaaagattttttttttgaataataggtgagattagtgtgtagggttggggggtagggaaggaggtgttgattttttagtattggatttttggggtagagtttttatagtttttgttgaatttttggtgggattaggttaggaaaggaggggtatttttgtttgttttaattttgggttttttttattttaagttttattgggttagatatggttgttgaatgagttttttttttatttagggaggttatggtattggggttagaattttcgggttttagaaaagttttgatgtagggaatttttttagagagaggagtttagggttagtgaggtggggattaaaggttatagaggttagattggttgttttaggtttatataatattgttgttggaagggatttagtttaagatgatggtgaagaggtttagattggggaagagatttgtttaaggttatatagtaagttaatggtaagttagaattagaagttaagttttcggatttcgtatttaatgagttttaagaggaaaaaggtagggggtggttattcgagtgttttattttttttttgatatttttttttttttgtttggtttaattattggtttttgattttgttttttttttttttagttaaagagagttttttgggtgagttagagttattttttgattttgatattgtggggatggatagtagttatttgagtgttaaggaggttggggtgaaggggttttaggatcgggttagtttagatttttttagtttattggagaaggtcgatttagagagtaataagggtaagaagcggcggaatcggattatttttattagttattagttggaggagttggagaaggttttttagaagatttattatttagacgtgtatgcgcgggaatagttggttatgaggatagattttattgaggttcgcgtgtaggttagtgagggttatttgggagtgaggttggtaaagtagagtttgtttttgggtttttggttgtagttggggttttttgattgtttattaattatattatggtttttttttttttagtttattgagaatttgaaagtgggggtttttagtttgttttttatgtttttgttttaattagagcgattttgtttttattttttttaatattgggtttttgtattgtggtggggggttgtaaaggaaggagggtttttagtagaggggtaggaaggttgttgttggttgtttttgggttttatatagtgtaagagttttggtttttttatatagagaagggttatttgtttttgttttagaaggtttattttttagataggaaataggataaatatgaagataatgtttatagtattttagtgggtagaaatagagaatagtttagtttttttttttgtttagatggttgtatttttttttattttttaagttttaatttatattttttttgagaagtttttttgattattgtggttaaagtagtagtttttttattattagttaataattaaaatatttaatttagtataatatagtggaatttaatatttaatttaatttattgtaatttaatagaatataatttaatagaatttaatttaatataatataatatagtggaatttaatatatttaatttaatttagtgtaatttaatataatataatttaatagaatttaatttaatttagtataatataatggaattgaatatatttaatttaatttaatttattttaatataatataatttaatataatatattttaatggaatttaatttaatataatataatataatggaatttgatatatttaatttaatttagtgtaatcgaatagaatttaatttaatttaatataatataatttaatagaatttaatttaatttaatataatataatggaatttaatatattaaatttaatgtagttttttttaatataatataatttaatataatatattttaatagaatttaatttaatataatataatataatggaatttgatatatttaatttatttaatataatttaatagaatttaatttaatttaatataatagaagtaaattagtttattttttgttatattgttttattttatttttttaaaaattttttaaattttttttgttttttttttagagatagggttttattttattatttaggttggagtgtaataagatgattatagtttattgtagttttaaatttttaggttaaagtgattattttattttaattttttaaagtgttagaattataggtatgagttattatgtttgggtttattttattttttgggtatttttgtttattttttttaaagagattgggtttttttttgttatttagcgtggagtatagtggtgtgattatggtttattgtagttttaatttcgtgggtttaatggattttttcgttttagttttttgagtagttgggattataggtatatattattacgtttgggataagtttttttattttttgtagagatggggttttgttttgttgtttatgttggttttaaatttttggttttaagtaattttttattttagttttttatattgttgggattataggtatgagatattgtgtttaatttttattttgttttttttataggattgttgattggtttacgttattttatttgtttgtttttttttattaaattgtgatttttttgagattaagtattgattgtttattattgtatttttattaattagagaaagttaaacgtagagtattaagtttaaaaaataagtattcgtggattaattaatttttgtttagagagttgtatttgtttcgattagtatgaatttatagtaaagaaaggattagaaagaaagaaaagatttatgagtagttaaaatataggtgataaaatttatatatttaagtttaagttttaatttaatataaaataaatgttataattagttcgtttttttaatttaaagtatgttggaaatagtaaataaaacgttgttatatagtagtttttttttttttagtgggttagaaaaattaatagttttagaataaagagaaattttttttttttttttttttttaattagtaaagcgttatgtagtttagtgggttgagttttttaatgttaggatagagatgttttaattttgtaatttttagtaggttttagggatttttgaattaatttatgaaagtatttttagtagtattgttttaaggtattagtaaaagatttattagttataattattttttgtttaagaaggtagaggtatttttaatagagtttataaattttttttttaaaatggttaatgtggaaaaggattagtggttattagtaaatatgtagttgtttagaaattgtagttattagaagtgatgttgaagagttgtacggttgagttgttgtaagttttttgagggtagtttgttattttttttttatttttttattttttgagataggattttattgtgttatttaggttggagtgtagtggtgtgattttggtttattgcggtttttattttttgggtttaagcgatttttatgttttagttttttaagtagttgtgattataggtatgtattattatatttagttaattttttttattttttggtagagatggaggttttattatgttggttaggttggttttgaatttatgattttaagtggtgtatttgttttggttttttaaagtgttgagattataggcgtgagttattatgtttagtttagattgttttttttttttttagatagagttttgttttgtcgtttaggttggagtgtagtggtgtaattttggtttattgtaatttttgtttttcgggtttaagcgatttttttgttttagttttttgagtagttgggattataggtgtgtattattatattcggttaatttttgtatatttaatagagatggggttttattatgttggttggttggtttttaatttttgattttaggtgatttattattttagttttttaaagtgttgggattataggtatgagttattgtatttggtaagattgttattttatttttttttagtgtttaatgaatgtttgatgaaggatgatagggtagttggggtttttttgtgaatttagaagtttttatatatttagattttatttgaatttggataattagttatttatatgattttatatgtttgagtttggataggaattttagtatttagtttgatttttagtaaatggattggggaggatttataggtgtaggtagagaaaggggtatagttggttatgggatagttttgtaggtgttgtgttggtgtgggataaatttgttttttttttgtgtagtatgtgtgtatatttgtgtttgtatatgtgggttgtatgtatgttttttaataaatatatgggagtgttcgggagtagaatttattaagtattgaaagaagaatgacgttttgagtataaaatatgaaaataaaggcgtatagagtattttttagttgttattatataattaaaatagagtgttttttgtatatatatatgcgcgcgtatatatatatatttatatttatttttaaaatggagttgaggtagtttataattaaagatttatttgtttaatttaaaaataagaataatggtatgaaatgtagaggtaatgtggtaaaaaaaaatttaggttaaggtttatggttgttattgagtataaattttaatttggagttttttggtagttaaggtagaaagggaaattttgacgtgttgtatattttattatttagtgggaggattatagaattatagaacggtagtgttggaaatgattattttatttttttatttgatagacgaggaagaagaggtttataggtgggaagttataatttgaagttaatagtagttatttagtagtagtattgcgattggaattcgggatttttgagtcgtagtttagtgtttttttgattttagtttgttgtataaggatatatgttagattgtttagaggtttttttttgtataaaggtagtagggtgggtgggatttttatgtgcgttagatttttgggttgagttttaagtttggtagtgttttgggggggtaagggggtggtgatggaattttttgtttgtttttgttgtgtttgtttagggtttatatttagttggtggtaagttaggtgtttggcgtagagtggtggtggggatagggacggggtaatgggggttttaagatggattttttttgggaagaagtttagggtttggttttgttttagggggttgtaggggtttttttttgttgtttgggattttaatttttgtagttggtgtttgaagataataagatagaggttttttcgttttgggttatttcgttttggttttagatgggttgcggttagcgaggttttcgttaagatagttggttttttgtatagttcggttttcgggagaggtttgtgttgagtgggtttaggttggggtggttttgaggtatgatatttagatcgggagaatagtggggatttcgtggttggttgtttttttggggttgtatagtggagataggtttgcggtgtagagttgggaggtataggaacgggcgtgggggttggtgtggtatttggaagggagttttcggagtttttggggcgttaggggttagaaatggatggatattttaagttttaggatttgtagatgtgagtatagaaggggtcgtgaggatatttttgttgtttttaatttattggggaggatattgaggatcggttaggtttatttagtttatgtttggatttgggtagaaaagttagaattgggtgcgtagggtaaggttttaggataaaggaataggagaagaaggagggaggaggtgggtagttttgtttttatcggtcgtttattcgttttttattatttttatttttagtttttaaataaattttttagtttgatttttttttatttttgttttaaagacggtgttagttttgttggtttttttttcgtttggttatttgttttttttagataatttatattttttttttttttatatttagttttagcgagttcgcgttttatattttatttttttatatggtttttttttttattttagatttttttgttaggcgttggttattttttttttttttcggggttttttttcgtttatttttggattttttgttttagagtttgtagggatattttttatttttatagttttattatggggatttggaatttatagagatataaggagaattttaatagttatagtgataaaaagaaaaagagaagttattttttttcgtgtttttagtggttttttttttttttttagttttttttatagaaaattttgggaggttgaggaaggagcggaaagacggagttaagtttgtaggaaattaaatatgaaatgaaaataagtttttttgatttatttttttattttggttttagttttttattttaggttattgataaagagggattttattttagtagtatagagaggagattttatttgtttttggtttttagtgggtagttagggtttggattttaggaatttttggaggaaaaggggttttgggaggttagggtaggggttgagattttaaattggggagagggttcgtttttaaggaagaggtttttttttttttagttaatgtgtgtgtatatatgtacgtgcgtgtagttatattagtgggtatattcgtgtacgtatatatatgtttaggattagggaggggaaagtgagttggtataggagtggagaaatataataatgtatatttttgtttatttttattttttttatagtaatatgagatatatttttattttttttgattttttttttttagtaaaagatagtgagaaaggttaggagttgtaaagaaataaatgggaagtattttaaatatttttggattgtattttttatttattttttttgttgcgattatgaggtattattcgttatgtagaaattgaggtttttggtaatattagtgtttttatgagtttgtttattggttagttatattggatgtttaaagaggttaggtagcgtttgtgaggaagtacgtttatatttttttttttttttttcgtagtggtttttaggaagtttaaaggttttgaggtagaggaattttgagagttgatttttatatttagtttagtagttgtattggtcgtgatggatggagaaatgtttttatttggagagtagggattggattttaggaaagttggtttttttgatgtttgggtttggaagggtttggtaaggttttttatggttttgtagttgaggttattgttatggttttgttttttcggtttgtagcgtgttgtttgaggtgtgtttatttgtatttgagtttgtaaagttagtagataagtgtatattaagttggtagaggtttttttttgaggagtattacggtttatttttgaattagtttaaagttatttttggtttggaagttgatttttttttatttttttttttttatttatttcgtttttattattttttttttagattttaagttatgggttaggggtagggtagtttttgtttttgagttttgggaaagtttttagttttttagaaatgttcgtgtaaaggaaaaggatttaatatttttcgttattaaaaattttagtgtttatagttgatttagagattttttttttttcgttgggtttttaattaggttaatattttatttatttgtgtttagtgacgggttggtttttatttttttttattattaggttacgtttttatataagattttatagtaattgtttttatagatagtattaagggaaaaattttttatttggtagttaaggttttttgcgatttgattttgttttttttttttttatcgttttttttaaattgatttttttaggtttttggagtatgttttgttgtttttaaatttaggttttggtttttttttttttagttaattatttaaggtttagtttttgttttttttttaggaagttttttttgattgtttttgttgtttagtagagtttttgttttttttttaatataggggagttttgagttgggagattgtttttaataagaaggttgtagataggatgtagggaggaaggtattgtgaatttggattaataagttttagagagttatgaattttttggaaaattgtggtaaaattgtgtgtgattgtttaggagaatatatttggaggagtatttgtagtttttattagtttttttataggagtttgtttagatgattgttaagatgattagtgatttgttttataggtggtgatatttggttgttttagatttttaagtttagaaaaataaaagttttggtttaggattacgtttatggttagtgggggtaagatatttttttagtttagagtggatgattttagattgttagtttttgaggataaagattaaggttgatatttatgtgtggtcgtatcgttttttaaacgtattgtaattgatggggggtttaagggaatagtttgtattgtttgaaagtgaggtttttaggcgggtattttattttggtgataatggttttttcgcgttttgtaggtttggttttagaatcgaagggttaagtggaggaagcgggagcgttttgggtagatgtagtaggttcgaatttatttttttattgtatatgagttgtttttttttattcgagttgagaattacgtttaggtaagtttcgttttgagttgtcgttatcgatttttagtttttggtgttttgagaatgagttttttggaggagagtttaggtatttcgagatgatttatggttttaggttgttttttcgttttattttaggggtgtgtttgtttatattagagtgtgggaggtttagggttaatttatttaattaattattgaattaggtttggttgaattttagggaagggaaggttggggtagtgagaacggtttttttttttattagttttggttatttttgttgtgggtatcggaattaaggtaggtagaaggttattaggtttttagatatcgttcggagggtttttttagaaagcgagttttgaaatttttaggattcgtggttaagttggaatgagtttgggattttgagttcggggatttaggttatttttttagttttaggttttttttattttaggtaagttttaaatttttgagttttagtttttttatttgtattttggatatggtaaaagtatttgtttagttttgttgttaggtagttgtaaggtttaaatttaattatgtaaaagtattttgtgaattgtatagttttaaaaagtttgtgtgtttgtgtttagtttttggggttttgtttttttttttttttagagtattttttttaggtgtttgttagttagttttttgttttagtgtgagatgtaagggatgagaagtattgagttatattaggtatatgggatgtttagagagatgtgtttttggttaagtttaagtttttttttgatttttatttagtttgtttagtagaagcggttgttttttatttgtttaggttttattttggtatggtttttattttagtttttaatttggttttgtttagtagttagttagtagtacgggcgtttttgttttttttatttttttttgatttggttttgtgttagtaaatggtttttggttttttaattagattagttttttgtttttttttttttagtttaggatttatggggtaggagggtagggtataggtttggaggtgaggttgaggaatatggggtgttttatataggtattattagtattagttcgtattatgtttttttatttttttttttttttttttttttttaaatttagtttttttttgtttttttaggatggaattttagttttttttttggttttgagttttgttgtttgagcgtatagttggagggagaatttaatatagggttttgtttattttttttatttttattttatttatagtattatatagtgtgtgtttagattttttttgagagggggtgatggaggttaatcggtttttttttttttgtatcgtagagagaaatgcggttttttttaggatgggggttgagttttttttttttgttttaaaatgtttttttcgagtgtgttttagatatatgtaggagggtaggttagtagaagtttatatgaggttattaggaatttcgtgtgtataagttgagaggttttcgggttttttttatattttaattttatttttttatacgtgtttagaaggtagaggaagatgggagttttaggtgaacgttggggagggaagggaagtttagtggtatagatggaagataagatggttaatttatttttgtatatgttttcgtttttttggtacgaggaggttcggttttagatttggttgtttatttttgaggtagttttttttattttgagttagttttgaagttttttagtttaggttttggaattttagttattgatttttggtttttgagaggtttaggtttttgtcgtttattttatttaatttttttattttttttgttattggtgggggtttaagggaatttgcgaggttaaagtttttcgagttgaggtttgtttattttgtttaggtgtttatggatgtgaggggtttggggaggagttggaggtgaatgagatatagttgttattcgtagatggaggttaagtttatagttgagtttaaaaataggaagttagttggggggtgttggggtgttatttttttattggatttttaatgaagtttgaggttattttttagaattgaatttttttttgttgttagtttggttttgggaatagagatgttaaggtgtaaaagttatttttataggggtatttggatgtttattaaggttaaatatttaagaggggttttatgggaaggatggatagtgaggggagaggtgttttgggggaaggggcgagttttttttatattatatttgttcgttagtcggtgatattttttttttttttttttagatttagaattcgttttggttcggtaataacggggttgttttattagtgttagtttgcgtggttttttgcgattcggtgtttgtttgtatgtttttttatgtttatttttttggttttggggttagtagcgttatcgattttttgagtgtgtttggggttggtagttacgtgggttagacgtatatgggtagtttgtttggagtagttagttttagtttaggttttaatggttacgagtttaacggcgagtcggatcgtaagatttcgagtatcgcggtttttcgtatgaaggttaaggagtatagtgcggttattttttgggttatatgatagggtatttttgtttcgtttttatttcgggatattatgggttacgtttatgttttttaggtttttagttttttattcgattttttttttaggaatttggtttgggttaggggtttgatttttagtatttttagtcgttttaagtttgaggtttcgtggattgttgggagggagggggtagtaggtttttggtttttttttggtattgaggttttgatttttgttttcggttataggtagtggagaaagttaggtggttacgttttttagtttcgtatttatgataagttgaaagcgtttttttgttttcgtttatttttttgttttgtttagttgattatgagttaatgttagatttttatgtagatttagtagttttattagtttagttttgtttatttttttcgtttttagtggggttttttggttattaggtcggtggttgtgtgtttgaagtataggttgttttgtagagttagttttttgtttttttatttttttttttttgaaagtatacggaattcgatttgttggggttaaggcgttagtttttattttttttcgaatagtgacgagtttgatagagtttggttgattgtattttggttgttttttaggttggatatatttggagagagtgggtagaggatgataggagttggagtcgaggatttttgttgttatttagtaatgttagtttttaggggagatacgggttagttttttattggatattataggggaggagttagatttgagggaggttgagaatatagatgttataagggtttttatggtgttagaagaaggaaaggttttgggagagggggaggtattcgggtggggcgtgggttcgggtagttttttcgtttttcggtttgtttggtatttggtatagcggggaggtttgggtagttttgttttttatttagagtttagttaggttttttttaggaggatgcggaggggttcgttttttttttgttttattttggtttttttttggggttgtttagtagtgtttcggtatggaaggatttataatttcggaatatataagttagagtttgggggtcgggtggtagagggttaaaagttgcgtgtaggttttgttagaggacgtgtggttatgttcggtttttaggttttgttatggttttaaattgattgttttttttgttatatttgttagtgttatcgttgtttagagttttttacggtagatgggggttttgtgtttttttaggtattaggaggtgttgtttttttttatatagttttttatatttcgtttttatattttttttatagggattaggattttttgttttttttttagtttgcggaagggtttttggtttgggtttttcggtgtggttttgttattgtaaatggggttgttaggatgtttttttgaaattaggttttttgtttttaggaagcggggttttgtgtttgtttgttcgatttttgtagtttgggtttggttttgagttttagtttttattttagttgggagtatatagtaatcgtttagaggtaggtttgttagattttaggtggggggtttttttagtaggtagcgtttcgtattgaagcgttcgttttttttatttttttttttgatttttgttatggagtagggttaggtttattatgtttagggtcgtggatatagaaaggttttttgggttgggcggagggtaaatttggtgttgttgaatgagggtttttggggttgggggtgatagtttttcgtttgtttggtgtttttatttgttttagaaattaggttgaggaagggtttggttgtggttttttttaatgagttagatttttttgtgaatcgtagttttaaaatggattttatagaggtgaaagggttttggatattgaattaaatgtttttggaggtttggttttaagtgttttaaatatttgaggatttggagtgatttttgggaagttttttttagttttgaggttcgttgaaatgatttagatttttttaaaatttagttagggaaaggaagaatttaaggttgggaatagtttttttattttttttttttttttttttgaaatgtttatggttgaggaaggatggggaaggaaggaatttttattttgggttttttttatttatgagagaattaggataaagaggaggagagttaggtagttttagagtgggttaggagggagagtaagggaattaggataaagaggaggatagataggtagttttagagtaggtagggagggagagtgagagttttaagggggttttttcgtagtggttttcggtatttagtttttttatgcgtttgttttttggttgggttagatttaagttaggtaaattttaatttaaaagtttgagaagaaaaggcgtttattagaagattttgtggttatggttgtttgttttaatatatttaggaagtgtttaggattaaatatgttaatgtgaaatatttttgtttatttcgttaaaggtagttacgtattttaggtttgttttttgtggtttggtttagtttttgggggttatttaattatattaagtatgataggattatcgagttgggaggaagtttagaaattttttagttagtttagtttttttataatagagaagattttggtttagagtggagatatgattgttttgatttgtatttgttttgagattaggttgagagaggagtttgggacgtgttatttagggtgtgagggtttgggtttcgttggtattaggggcggtcggtgttgtatggagtttttttttttaatgttttatgggtatttatttagtagtttagttttttagaagagaattttggggtttagttttttttaagataggtggttaggtttaattttttgtattgtagagtagggggttattgtcgtgttagtttttaggatgattgagtaagttagggtagttgtttaaggttatttggagttaaagtttatgaaggtaggtggagagaagtatttatttgttacgtggtttattgttatgcgaataagttaagagaggtgaggattttttttggatatttgtttaagattttaatagagatggtaatttaaaaataaagtcgtgggtagtcggtagatggatgggtagtttttttatattgatagtttttagtttttgttgggtataggttttagtatggtaaggtttgatattaaggtgttgttattgttttttagatgttagtattatttttggggtatgggagcgagggttttggggggtatatagagaggtttgtttttaaggttgaaatagtatttggaggatatgggtttttagaattttttttgaatttttttaattatatttgatttttagcgtttattatcgtgtttttagtttcgggaagtacggtggttaggttagtttaaagatattgcgatggggtaggtgtagtaagtgtggggtgggtttttagtatatatagttgtgattatattggatttagtttcgtgttttattttttgttatttcggttgggtagacgagggacgtttttatgaaaattacgtattttgtttatgtagttattttttttttgggttagatagtggggggttattttcgagaatttgaaagatacgcgggggtttttggtttgttttatggtttttattgtttagtgtaaaggtaaataggtttagttgggggaggatggttggtaaattggtttttaggataatattttgtgattatttagttaaaaaataagaaggtgataatgatttattaattttattttattttttttaggatgttgtagggaggaaaggtgtttttatgatttaatttcggtttttttttttttttttttttatttatatatatagagttaggtttttatattattgattttgaaggatagtttttaatgtttaattatttgtttaggtgtgtagtggttgaaaaaagaaagttgagtgttagaaggaatatgaattttaatcgttatttattgtttttattgtaagatattttaattttgtataaatgtaattttttttttagtttaatggtttggggtggaatattaaaaatatatattaaaaatatagtaaaaatttagaaaaatgtaaaaaaaaaaatgaggtcggttttataaagttttattgtttatattattatgtaattatattatagtaaaatattaaaagaaacgtttttgttttttaaagtaagttattgtatttatattttttttgggagaggaggaatacggatgggaaggagatgtaggggtttaggtatggggtaaaatggagtgtagaggtagtcgggtatttttagaatattttttgttggtttagtttaaattgtttggttgttgttatttgtaataaattttttttttttttttt

SEQ ID NO: 5 - DNA, 221909 bp, Artificial Sequence
  chemically treated genomic DNA (Homo sapiens)
aaaatttcgtttttattaaaaatataaaaattagtcggttgtggtggcgtgtgtttgtaattttagttatttgggaggttgaggtaagagaattgtttgaattcgggaggtggacgttgtagtgagttgagattatgttattgtattttagtttgggtgatagagggagattttgttttataaataaataaataaattaggtgcggtggtttatatttgtaattttagtattttgggaggttgaggcggggggattattttaggttaggagtttgagattagtttggttaatatggtgaaattttgtttttattaaaaaagaaaaaaattataaaaaaaaaaaaattagttaggtgtggcgggtatttgtaattttagttatttaagaggttgaggttggagaattatttgaatttgggaggtagaggttgtagtgagttgagatcgtattattgtattttagtttcggcgacgagggtaaaatttttttttaaaaaataaaaaataaaaataaataaataaaaataaaatttgaggtttaaataattaagtttcgtgtatttttttaattttttttttttttttttaattttaattttatgatagattaagttttatgtattttaaaaatgtgtagaatttttatttttagtttttttttttttttttttgtttttttttttgattttttggaatcggaaggaaaattcggatatttaggaattattatataggaggtatttatgtgatgtgtttaatattattttacgtaggtgtttttgggttttgggtgtttaggtttttgtgaattgtgattttaggtagaagcgtgagtattcgtagaggaatttatttatttaaagttagggaatagttagggttggtatttttagggtgattgtgttttagggtatttttgatttgtgttgagtaaaatggataaagttagtaatgtatttataatttagatttttgagatatcgttggattttgggaattttaggtattaggttcgtggtagtgttattatggttaggttgggggtagtgttattatggtgtttgttggttaagttaggatacggtttaagtcggaatttgttggtgttggtataagcggtgagtgggcgtgtgggtgggggttgcggttagggtgtggatattttagaatttaggacgttgtttataattcgtttatattttttgttttttttttttatagtatttttttttcgaggttttttgagtttttaatttttagataaggaaaggggtggatttagttgaagtttagtgtttatttcggtttaattagttttatttggggtgaggggaaatttttttggttgggttgttttttttgtagggttgtggttggatagattatttaagaaaggaagtaggtgggtcggaacgaatttacggtgttatataggttttcgtttttatgtatataagttttttatatttaggtaggaaatgaaaatgttttttggatttttaaggagagtaaaggagaggggaagaggaggaggatttttcggggttgttagtgatatttttagttttttgtgtatttttgggagggttgtaggagaaggtaatgttgcgtttttatttagaattagcgagcgttttttaattggtttttcgtttttttttcgttttttacggtttttattggtagttgtgtaagggttcggttttgtttttgtttttttatattcgttgtgatattttaggttttttaggtttcgttacgtttttttttttttcgggaatagttgttttttattattttggttgtttggttaatttttgtttattttttaaaattttgttttgatttcgttttaataaaattttgatattattttttagttataattagttatttttttttttgtacgttggaaatatcgttttatcgtggagattttaaggatatttaagtagagagaattttttcgtgtaagttttgtatttttttattattgtttgcgttattcgagttgtaaagggcggttttttgtgtttgtttcgttgtatcgatatatcgagttgcgtacggtgtttagcgtagggagaataaatgattatttgtttaacgcgtttatttataggtgaggaaattaaggttttaatttaatcgacgtattttgtttttttgattattagaaaagtagtaggataggtgttttgtttcgttttatttcggtttattaagtcggtatttcggtttcgattttcggttgtgttcggcgtcgtcgcggtgttcggcgtcgtcgtttcgttcggcggggtcgttcggagcgttcgtattttcgttcgtttttatttggtcgggttcgtttcgttcggattcgggattgggaagtgcggcgattttcggaattagttattggcgttagcgcggggagttgggggtgtagagttgcgggcgcggcgggttacgtaggcggtttttattttcggtttggtttggtttggtttggtttgcgttgtcgcgcgggggcgtttttttttaggttcggcgttcgttagtttcgtttcgttaggtgtagcgtagcgtaggggtgggcgggggtggggttcggcgcgtacgtttacggggcggggagggggcgggttaggggcgggattatagtcggttgggtcggggttttatgcgtattttcggggaggggcggggcgggggcggggtcggggcggggttcggtcggtgtattttagacggcgggtcgtttttttttttcgtttttttattatcggtttaggattagcgttttgggagcgcgcgtttcgttgtttcgtcgttatatttttttgggagcggcggttacggaggtattatgaagaagttttatttaggtgggtttcgcgttcggggtggggaggggtcggtgtttcgggattagcgttgtttatttgagtgtttgcggtcgggagtggcgaggcgttttcggagttgagcgagttttcgcggcgggtatattgtaggtcgagttttttttaggatagggtcgttgtcgggtcgttttcgatttgagtcgatcgttttttgcgttgtttttagtttttgttcgagtgtcggaggggttgttttgggggacgttttttttttttcgttttttgtattttcgtaggaatcgttgattttttaggtcggtcgggtgttttgggtttttgtgcgtttgtgtgggtgaatggggtcggggttaggtggaggggtgtttttgggtttagtttttagggttggtggtttaggtcgtagtatttttttttcggatttttttcggttttttttttatttagtggggtacgggacggtttttagatgggatcgtttagtagcgtttaaatttggcgattcgggtttacgttttgcgtttaggacgtcgttcgcggttgatatttttattttattttagtagggttcgttttaagtaggcgaagggggtttgatttgggttttattatgagtcggtttaggagtttttattttataagaggttttcgttttggtattttgaagttttattttatagatgggtatatcgaggttataagggtaggttaagagaaatttagatttttattatttgtttttttttttttttttttttttttttgtggttttttttaaaggatttaggtaggtaggattttttgttttttttagtttttaaattataaatagcgtttttttttttaaatttagaaatcgtttgtttaatgttttttttttaatttatttagatagaaaggtatttgttaaggatttatgaattaatttttattgataggagaatagaattatgggttttagttggaggtgaaggagttatcggggttatttttttgtttttgggttattgtcggttttttttggttttttatatttaggaattaaaatgagtgataaagtattttgttttaaagaggattatttagaattttttcgaaaatatttttttgggttagtagtttagaattttaatttttattcggttgttgcgaataagatggttttttacgtattcggagtatagttttgttaggagcgtgggtgggttggtgtgttggtgggcgggagcgggtttttaggtggtatatgtttggttttggtatcggggttttttttttaatatgttttaaatatttgagattgttgtggggatcgcgcggtgtatggttttttttaggggatttttagttcgtttagggagggttttttgtttttggttttttatattttattttttattggtgggtttagatagtgggggtgatcggggtttttttaggtcgtgggttttgggttttttttgcggagatttttttgtatagatgtcggaagggttttgaggtaggtttggagtttttgtatttgcggtttattgggaggtggggagattattatttgtttttttttttttttttttatatatatttattttattttttattgggttttttttttttttttttttttaaaaaaaaggatagaattttttgtagtaggtggaagtagagtttgtggagtgagtaggaattaatttttgtatagtagtttcggtgtttttttgtgtttatttaaaggggtaggtttttttgaggatgggggaagggagggtttagattatttttggtttgttttttgtttggtagtggtttaaggtgtgttgggttattgtgttgtagttgtatggagtgggattggagggggttgatggtgggggtggttttttgtttttattttgagtgttttggagttgttttggtattagttttttttcgggtacgggtattcgtaggagttaggttgattttttaataagttatcgatattatgaaattaaggaaagtagtaaaagatgttaaaaattttttaaggttttgataatttaaggataataggaaggtttttatttttttatttagattgtgcgggattattgtttttagatttgtatgtgggttttagaataaacggaatgattataatgttgttttcggtagatttggtttgaatattcgtgagtttttgaaaaggagaaagattttagaaggatgtgttggggtaattttaagtatcgtgggtttatagatagttatcgaagatattttatgtgttgggtatatatggttaagtttgagtgggtatagaaatggtaatgagatatagtttttgtttgtagagaatttatatttttatcgggagttaggatgagggcgagatattagtttattaatattttttttttttgagtagtttagtttttaaatattataggaatgtttcggaggttttaggtggaggtgagattgagttgggttttgaggaaggagaagttttgagtagtggagaataaaaagggatttggttaggtgcgtttgaagttttagttatttaggaggttgagatacgaggatcgtttgagtttaggaggttatttaggaggttgagatacgaggatcgtttgagtttaggaggttatttaggaggttgagataggaggatcgtttgaagttaggagtttaaggttgtagttttgtgatagcgtttggaaatagatacggtattttagtttgggtggcgttatgagattttatttgtaagaaggttttttttaatgcggaaggtagtaagggtttatatagggtagttgtaggatttagggggatattggggataggttttttttggtagttttattgttgttttaggttttttcgattgttttattcggttttttaatggggtggaggtagtggtagtttataggtagtgtggtttagtggttatatttgggggtttagagtcgttagttttttgggattaaattttattaggttgcgtttttttttgtggtataaggtttttattttatgtattttatttgttttatttgtttttttgtgtgtgtggtgttttttaattttatttatttatttatttttgagacggagttttattttgttttttaggttggagtgtaatggtatgattttagtttattgtaattttcgttttttaggtttaagtgatttttttgttttagttttttgagtggttgggattgtaggaacgtgttattgcgtttagttaatttttatatttttattagagatggggttttattatgttggttaggttgatttcgaatttttgatttcgtgatttgtttgttttggttttttaaagtgttgtgattataggtatgagttattacgtttagtttgttttatttgttaaatgggatagtgttatgttgttgtaaaggttaaacgagtttatatttgaaaaagttgagaaatgtttgttttgtaatttgttagttgttgttatgattatgattgttattgataggaggatggagaaggttggggttacgttattgttaggacgttttagaagtttttatgatttttttttattgtggttagagtatggtgtagggttttttttttagttttttagtattggagttagttgtattgtattcgttttggttttttaggttttgagttttgggattttttttgtatattaggttatatggaatttgtcgttatttttaggtttttttggaaattttttgtgggtggtagcggtaggaggatttattcgaggtcgatgagttatagaagcgggattgaggttgcgttatatttttattggtatttgggaattattttggagattttttttttattttttatttttttgagatggagttttgttttgttgtttaggttggagtgtagtggtacgatttcggtttattgtaatttttgttttttaggtttaagtaatttttatgttttagttttttgagtagttgggattataggtatgtgttatcgtgtttagttaatttttgtattttttagtagagatggggttttattatattggttaggttggtttcgaatttcggattttaggtgatttattcgttttagttttttaaagtgttgggattataggtatgagttatcgtgtttagttattttggagtttttttgtggtttttaggagatttttgaaggggtattagttacgattaaaaagttttatgttgtcgtgatttttgagttttgggtagggagggaggttgtatttatataggaagtagtttttgtcgtgatttagtgtgttggttcgtcgtggtggatagggttgtatttttatttagcgtttcgggagttgatttacgggaagggtaaggaattgtatttttagagaatatttttttagttagttaattcggtgataggcgagcgtgggaagggtataagtatagggtttttttttttttttttttagtttcgttttcgcgtttgttttcgttgttttttgtttttttacgtttaagtttgtttgttttggcgtatttaggggatttggattggagagaaaaagttatttcgtacggttagtttgtggttttgtttgatttgtgtttttcgtcgaggttttttagttgtgagatagttggttgagtttaagttttggggttagttttttttttagtttgttgtaaaggtagaaaggtatgtttaggtaggggttatttgttttgttcgtttacgttagatcgtaggtatttgttcgttagattttttcggtttgtttagagggattttgatagtcgagggtaatgtatttggtagcggagtattgcgtttgcgatagtttattttttttttggaattattttttataagtgtgattagtttaagttaggataggtatagggggatttaggattgttatttaggggtagtggtttggaatttaggtttaggtgatatgggagttaattttttgtttggagattttaggtgggtgtttgtagaggatattttatttgaggatttatggaaggggatattttttattttttatttggtttttgggttgtttttttttgatatttttttgttattttaggtagttttgatagttttatgtgattgggatttagaggtggtttttgttttcgttttagtgtttgtttataggtagtgttgcgtgggttttgaagtttgtttaagatggatttgataaggggagtttagtatatattagtgtaggttcggttagggggtgatgatggtagtttttgggtagatttagttggttttagggtaggaggggttttagagagaggttttaggtttttaggggtgtgaatttttggggtgaggcgggaagtgacgcgttgggtttttgcgtttttgtttgttggagttattattttggaaatattttagttttaggcggttgttagggatttatggggattagtgggtgttaatttttgggtgaagttttcggggtttgtatatagtatatagcgttgtggttttatggtttattttgttgtgtgaagtggtttagttttcgggagagtttttagttaggtaggtttgacggtaattgttaggttatggtgatttggaatcgttgattaaagggagttagttttggtgggtggagggatttggtgggtagttatcgtgatgttaggtatggggatcgtgtgttatttaggtttgtgggtgtcgagtttttgtgggagtagtgaagtgttttcgtggtcgatgggttggttatttttgttttttttttgatgtgatagttgtgtttgggtttcgggaaatttgttaggaggtttggtattggtttgttttattggagcggttttgttgagttgtgagttgttcgtttttttgaggtttttagtttattttaattttttatgtggatttggttatttattttagaagcgtttgtcgggcgttgttgagtgttaggttttgtttgtttttttttttgtacgttggaggttttgggtattagttttgtagggtggtttggttttgggtttttagggtagagtatggtattttttgtttttagtttagtttttttttgttttatttttttgattttattttgggtatgggtttatttgtagtttttgtgaagggagatattgagttgttgttggtagaggaggggcggtttttgggtattgtttgttaatggtttttcggtagttttgtgatagttgagttttgtttttagtttaatttgatttggttttttaaagtatgattgttggtagtttgaaaatttttaggataggaaataggagtggcgtagggaatgtaagatgattttagttttaagttattgggcggtttttagatttaggttgtttgttgtttttggtaggaatttaagtcgttggttatttttagagcggtgttggttcggggtttttagtggtttttgtgtttgggtgagaggaattttggatggttattttgttttgagtgtgtgggtttttagaagtgttgggttagggggtacggagggttagaaagttttttttggagcgttggattttttcgttgatttttattttatttcggtttggggttttagagaaggggtttaggtaggagtgttatttttttttaatggggatgtggttttagtttttgtttaggtgggtgtattgtttttttttcggttttttttaggttgtttaaatgatttgtgacgaggtttgcgttatggtcggggttttttgttttttttagcgttgtatttgggaattaggggttgggtttcggaagtcgaggatgtttttgaatgttatgtttgggtatttgttttggttaggcgaggcgtgttggggtagcggttgagatgggagtagtagtattgtttgttaggtttgagatgggtttcgggtgagtgtggttattaggaagggttgggtagagtaggcgggtgggtcgtttttggggttttgtttcgtagattaatttgattcgtattttggggtcggggtttttttttatagtttttttatgaattatggtttttgtttttattttaaattagattttagaagaggaataatgtttatgtaatttaagttagttggaagtgggttatatttaatttttgttattttttagtttgttaaggatttgattaatttaatttagagggatttggagggttgtttgtaaaatttattaataatagggaattttagttttgtagttatagggtttatagaggtgtcgggttgtcgggttattgttgggaggtgagtcggtggcgtagatattatggaggtatcggtagtggaagagttgtaagtgtatatagaggtcggtatcgaggggcggggaggaggaggtggtggatttttcgttagtgttggtattatgttgtttttagtattagagatttaaggtgtggttgattttggttggggcgatgagttattggatagtagagtttttttggtagttgggggttaacgttttaattgtcgggattttgtattatgtcgttttttttttttgttttgtttggtttggtttggtttggtttttgagacggagttttattttgttatttaggttggagtgtggtggtttaattttggtttattgtaatttttgttttttgggtttaagtaatttttttgttttagttttttgaatagttgggattataggtacgcgttattatgtttggttaatttttgtatttttagtagagatggggtttcgttatgttggtcgggttggttttaaatttttgattttaggtgatttatttgtttcggttttttaaagtgttgggattataggtatgagttatcgcgtttagtttgtatttatgtttttttttttttttttttgagatggagtttcgtttttgttgtttaggttggagtgtaaaggcgcgattttagtttattgtaatttttatttttcgggtttaagcgatttttttgttttagttttttaagtagttgggattataggtttgcgttattatgttcggttaattttgtatttttagtatagacggggtgtttttatgttggttaggttggtttcgaattttcgattttaggtgattcgttcgttttggttttttaaagtgttgggattataggcgtgagttatcgtattcggtttatgttttttattattattatttaattttttaaggaaagtaatttaaattgtatattgtatttttttttttttttttgttttttgttgttagttttttgtattatttattgttaaataatatgaataggaaattgaaaggaaaattttaataattattggttgtagtattttttttgtgttttatttagtgtttgtttttttaggaatatgatatagggtttgatttaattatgaaaggcgtatatttttagagttttatattttttatagaatgaatgttgaattttgttttttttatttgaaattagattttaggtatggattttatgattattattataatggttttttagagtggatattgtattttgtagggaattattttttttttagttgttggtgtggacgtttttttttgatggtgtgggtttgggtttttgaagggtggtgttttgagtaaagatgttatagtagttatgtttatagttttgggtttggggttaggtggagattggttttaattttagagtttgttgttttaaaataaatttttttttttttttttttgagatggagtttcgttttgttgtttaggttggagtgtagtggcgcgattttcgtttattgtaagtttcgtttttcgggtttatattatttttttgttttagtatttcgtatagttgggattataggtattcgtttttacgttcggttaattttttgtatttttttagtagaggcggggttttattatgttagttaggatggttttaattttttgatttcgtgatttattcgttttagtttttaaagtgttgggataaaataaatttttagggtcgggagcggtggtttatatttgtaattttagtattttgagaggtcgaggcgggtagattataaggttagaagatcgagattatggtgaaatttcgtttttattaaaaatataaaaaattagttgggtgtagtggcgggcgtttgtagttttagttattcgggaggttgaggtaggagaatggtatgaattcggaaggcggagtttgtagtgagtcgagattgcgttagtgtattttagtttgggcgatagagtgagattttgttttataaataaataaataaataaataaataaataaatttttatatttatttgtattatttattattattattattaaatagggttttgttgtgttgtttaggttggagtgtagtggcgtgattatgattttttagtttcgattttttagttttaattggttttttttttttagttttttgagtagttgggattataggtgtgcgttgtatgtttggttaattttttttttttttttttttttgagatagagttttattttgttgtttaggttggagtgtcgtggtgtaatttcggtttattgtaattttcggtttttggattaaagtaatttttttgttttagttttttgaatagttgcgattataggtatgtgtcgttatatttggttaatttttgtatttttagtagggacggggttttattatgttggttaggttggttttaaatttttgatttcgtgatttatttgttttggttttttaaagtgttgggattataggtgggagttatcgcgtttggtatgtttggttaatttttaaaaaatttttgtagtagtcgggcgcggtggtttatgtttgtaattttagtattttgggaggttaaggaggtcgggagttcgagattagtttgattaatatggagaaattttgtttttattaaaattataaaattagttgggtatggtggtatatgtttgtaattttagttatttaggaggttgaggtaggagaattgtttgaatttaggaggcgggggttgtagtgagttgagatcgtgttacggtattttagtttgggtaaagagagtgaaatttcgttttaaaaaatttttgtttttgtttttgtagcgatagggttttgttttgttgttgtttaggttggtattgaatttttagttttaagcgatttttttgttttagttttttaaagcgttgggagtataggcgtgagttattgtgtttggtttttatttgttttggttgtttttttttgttttaggtaattatatatttttttaggtaattaagaaaagattgcgtatgatgagttttttttttggtatttttgggattgtttttaaaattagataagtgtttttattttgatattttattaagattttaatgaatagaatgtcgtttgtttttagtttgttggtttttttgcgaaggtttagggtttttttgtttgaaaagttatttttttgtcgaggtttttgatttttttttattacggtagttatgtcgagggtttatagagttattttttttttatttttttttcggttttttaagacgtatttgtattttcggagatgtttttttgtttttttgggttattttttttggtcgttatttattttgttgatttattatttgtgtaatagttttttttggaatttttaggtttttgttatttattttttgtagttttcgttttgttttttttgttttagtttttttttttattatttttttatttgttggtttttatttttgtttatggtatatttttgtgttatattttgatggttggataaaggttgagtgaaacgtatttatttttttggtgattggggtgtttattaattagaagggatttaaggttggcgtagttttttttcgtattttggggtatcgttttgtggtttttttttgttggagtttgtagttttttgtttttttttttttaaattttttgagatggagtttcgttttgtcgtttaggttggagtgtagtggtgagattttagtttattgtaattttcgtttttcgggtttaattaatttttttgttttagttttttaagtagttgggattataggcgttcgttattatgtttggttaattttggtatttttagtagagacggggtttttttatattggtcgggttggtttcgaatttttgattttaggtgataggttcgcgtcggttttttaaagtgttgagattacgggtatgagttattaggttcggtcgttgagattatttttataagttattaggtttggttgtagttggtagtttttgattattggtttcgttttacgtgatttgtgattttttttttggttttttggttttgttttgtttatttgtttattttttttatgtatgcggtttgtttatagggtatgtaatggggtttaattaggaaatggaaatcgtttgagtatttatttatttatttatttatttatttatttatttattttttttaagataaggttttattttgttacgtaagttgaagtgtagtggtgtgattatagtttatggtagttttgaatttttgagtttaagcgattttttttttttagttttttaagtagttcggattataggtgtatattatatgtttgtttaatttttttttttatttttgtagagatagggttttgttttgttgtttaggttggttttgaatttttaattttaagtaatttttttgttttagttttttaaagtattggagttataggtatgtgttattacgttttgttaatttttgtattttttgtgtgtgtgtaaagataaggttttattatgttgtttaggttggttttgtatttttgggtttatgtgatttttttgtttgggttttttaaagtgttgggattataggcgggagttatagtgtttggtttatttgagtatttagaatagaaggatttaaaggcggggaattagttatatagatgatgggagaggtgaaggttagatagggaatagagaggtaattagtaggaaattaaagtggtgtgggtttatatagttttttaaaggtatggatgtaatgatttatttagaatgagaaaataaataatagtaaattataaattataagtagttgttaaatattataaatattattatatgtagaagagtattagttaattgttagttatatttttaaagttttattttttttatatttttggtattatttttttaatatgatgattttgtaatatcgttttttatttcgagaatagaaaattgattaggttggatatagtggttcgtgtttgtaattttagtattttgggaggttaaggtaggtggattatttgaggttaggagtttaagatcggttcgggtagcgtggcgaaatttcgtttttattaaaaatataaaaattagtagggtatggtggtatatatttgtagttttagttatttaggaggttgaggtgggaggattgtttgagtttaggaggtcgaggttgtagtgagtcgtgattatgttattgtattttagtttgggtgagagagtgagattatgttttaaaaaaaaaaaaaaaataataaaaaaaaatataggttgggcgtggtggtttacgtttgtaattttagtattgtgggaggttgagatgggcggattatttgaggttaggagtttgaaattagtttggttaatatggtgaaattttatttttattaaaaatataaaaaattagttaggtgtgatgacgtacgtttgtaattttagttatttgggaggttgaggtaggagaatggtttgaatttaggaggtagaggttgtagtgggttaagatcgtgttattgtattttagtttgggtaatagagtgagattttattttaaaaataaataaataaataaagcgaatgaatttttttagttgattaaattttgtttttatttttggtagttgggatgtatataaaagtggcggttaatatggagttggtggtgttgttataattgttttgtttaagatatataggaattttggtaaattttgtttttttttttttttttaaatgtgatttttattaagaaagaagtaggaaaatgggggagatttttaattgtatatgaggtatttgtgtatgtatttttgattagagagatttttttgttttgattttatattgaaggaattgaattttttgtttataattttatttttggtgatgggagtaattttttatagatttgtttttggattcgtgtattttaaattttgtttttttttattgcgtacgttttttcggcgttaggtatcgtaggatatgttcgtgttttgtgatttttgattttgcgcggtaggtggaattggaacggtgagtggagcgagtattgttggaattcgtttttatatcgggatagcgagtagtaattgaattatatatggaaataaatgggaattatataaatataattcgattaaagttaaattaaatatttttttagtttaatttttttttagtaggagtttttacgtggtagtaagttttcgtttttattttatataagagaaaatgtgacgggtaggaatttaagattggaaatgaacggggacgttaattgattgtagggaaaatattttttattttgtaaattttataaaaaatgtttgattttgtggatatgtggttagggttttttttagtgttttgagagggaattatgtaggtagagggagggtttttagtattgtgggggtgatttggagattggtagtagggtgttattattatttttaggtggggatgagagggaggaagttttgtgattagagtttaggggttagagttatttgttgggagtttaaataaaggtgggattttggtaggagttggaattatatagaggattattttttttgttggagaagttgtttgaggtagaggaggtggagagttttcgcgtttttttttgtttttattttttaggttttttttaagtttttcgttggttgaatttagtttaaagttagtaggtttggggatttggatatttgagttagtagaggtcggcgttttttttatataaaggagggtataagaagtgggaggtacggagggggattaggttaggatttatataggatgtgtaaataggagtttttttttttttttattttaaatggtatttgtagtcggttttatttttttgttgttagataggaagaggaattttgttttcggtattagttgtttttatcgttttttattttacggaggttttttttttttttggtttttgtttgtaattattggcgacgttgatggattatattttttggggagtttggttatgaatatggttttttatttgttgtggattaaattgtgtttttttttttgaatttttgcgttgaagttttaatttttaatgtagttgtaattgaagatagggtttttagggaggtaattaaggttaaatgaagttatagggtaggattttaatttaataggattgatgtttttataagaagagggagagatattagagattttttttttttttttatttgtaaatagaggaaaaatgacggaggatatagtagggaggtgggtataagttaggaagaggggtttcgtcgggaattaattttgacggtattttgattcgggattttgggttttttaaattgagaaatatatgtttgttgtttaagttattttttttatagtaatttggatggtagtttgagtttattaaggtatcgtttgtattagttagggttttttagggagatagttaataggagatggatggatggatggatggttagatagatagataagcggatagagagagagagagataggtagatatagatagataggtagataaatggttagatagataagtagatagagagatagagatagatagatataaataggtaaatagataggtagataaatggatagatagatgatagatagttaggtaggtagatagatatagataggtagatagatagatagatagatgataggttgggtttagtgatttttatttgtaataattagtatattggtaggttgaggtcggtggattatttgaggttaggagtttgagattagtttggttaatagggtgaaattttatttttattaaaaatagaaaaattagttgggcgtggtggtgtatgtttgtaattttagttattcgggaggttgaggtacgagaattatttgaatttgggaggtggaggttgtagtgagttgagattacgttattgtattttagtttaggcgataaagtgagattttattttaaaaagaaaaaaaagatagatagatgaatggatagatagttagatagatgatagatggatgataggtagatagataattgataaatagatataaatgatcgatggataggtagatatagatatattgattaggtagatgatagatggatagatagaagatagatggtggatgggtgggtagataggtagatagatagttagaaagatagatgatagatagataggaaggaatttattaggggaattggtttatattattgtggaggttaagatgtattatagaaggtcgttcgtaagttggaggtttaggaaagttagtatcgtggtttagtttaagtttgtaggttttaggattgggaagttgttgatgtaatttttagtttaaggttaaaggtttgagagtttggggaattgttggagaattgggagttttaagtttaagggtaggagaggaaggtattttatttttaggagaaagagggaatttattttttttttgtttttttgttgtttggtaatggaatggtgttatttatattgagggaggatttttattatttagtttattaatttatatgtttattttttttagaaatatttttatagatatatttagaagcgatgcgttattagttattttttaatttagttaaattgatatttgtcgttagttattatataggtttagaagaatcgtggttgtatggtgatggtttttatttcgtttaaagaagttgaagatgaattgttggtataagttatcgtttttttaggttttttttagtcgtttatttttttaaaaatgtatttattgagtatttgttgtatgttaggtgttgtgataagtattggggtatagtagtgagtaaataaggatttttgttttttggagtttatatgtagtagaaggaaatagaattaatgaatttattagttttagaaattattaaaataggattaagagttgtggtgagaattaagataaggtgattgtatagaaagtgattgatggttgttttggaatgagtggtgaggggttatagagatgatgatagttgagttgagattgggaagataggaaggagttagtagtgtaaggattaggttggaagtaagtttggtgtattttaggaatagtaaggaggttagaggggttgtagtagagtaggcgaggaggaggagggagacgtaggttaaagaggagtttggggttagatggaggattttttttttaaagtttagttattttttttttaaaggagaatgtgttatttttaaaagttatatatgttagtatagtgtttggtttattatatgtttttagtaggcggtgagtatggttgtttttgttattattatattataattattaggaataatggagttattaggttttgtatttatagtaatgtgagggagttagtaagtttttttggggaatttatttttttttattaagtttataagagtttgataattaggttaatgtagtgagagttatagttgtttagtgtattggattttttagttacgggttaggatatttttattttagtagaaatttttaaggggattggggagtgtgttgtggatgtttttgggttatttagattttttggggagttttttttatcgtagttgttgtagggagtttagttgtagtgatgaattgcggtttagttttgtttatgggaaaattttatatgggagatgggacggttttttgttggttttttcggttttaggttgtttttataagtgtagggatttttatttgggtgtgtgaatggggtttaggatgttttaagggtatgtggagatgggggttagttgttttttttgatgtttttgaattttttttttttgtttttttgtattttattgttttttggttttttttattttgggtgttttggaataatatgtaatttaatatataggttgattttattattttgttttgttttattttattttattttggaaataaaggttttgttatttagtttggagtgtagcggtgtaattgtaatttattgtagttttgaatttttgggtttaagtgattttttcgttttagttttttaaagtgttgggattataggtatgagttgttgtgtttggtttaggttggttttaaaagttttttattttttttgtattttgatgatatttattttttggagtaggtttttagttattggtttcggatattttgtagttattattggttagttgtggtatgtgaagttgaggtttaggagaagggtagttttgtttaaggttatacggtttagtgttaatatttagattttagtgtttttattttttttttggtcgtttttatttttagtgtatttttggaggtttaagggagttaaaggttaggttttggttagttaagaatttaaaaaagttgtttttgtgtttttttgttaatttattattttattatttttttcgataatgaatttagtttgaattttagataaataaggattaatttttagtataagtatattttataatagatttgggatatatttatgtttaaaaatgatttattgtttgttggttttagtagtttatgtttataattttagtgttttgggaggttatagttggagaattgtttgagtttaggagtttaaggttatagtgagttatgattatgttattgagttttagtttgggtgaagtagtaagatttttatttttttaaaaaattgttgattgtttatttgaaatttaggtttaattgagtattttgtattttatatgagaattttatataggtgagatttagagttttaatgtttattggtaagtttttgtagggaggttttgtgggtttttggttggtattgatgttttgtgatgagtagggttatttggtaaggtggacgtttgttgtttatgtaggtagagtaaggttttgggtaggtatgagttgattttattttttttagtttgggagttagatattgttggtagtttgtcgttaagagaggggttggttattaagagaggggcggtttttatgggttttttttggtttttggtttttttttagttttttttttattttaaatagaggttaacggtatcgtattagaattagtgtgttgttttttttggttggtattttgtagttgggtagattgttttttttttataggagttggtggtgtttttttcgttttatagggaggatggttgagatttttgattttgatatagggtgttgttttttttttgttttgagatagagttttggtttttttatttaggttggagtgtagtggtatgatgttggtttattgtagtttttattttttgggttttagtaatttttttgttttagttttttgagtagttgagattataggcgtgtattattattgagaataatgttttttatagtgtttatttttttgtaggagtaagtttttaaggtaaggaggttgttttttttatggatgaataaattgattttgatttatagttttacgtgttagttttgagggtggggaaaggttgttttgtgtttaggtagggggtgggggtaaggttaggagggtttggtgtttagtgtatttttttaggatataattttaggtagtagaggttaaggatagaggggaggagaagagggaggtggttattatttttttattttagttttttttggagataagtttgagtattttagttgtttattaagtttggagataagtttggaatttaaatttttgattttgatttagttttttatagtttttgtgagtaaattgagttttagaaaaagggagtgaagtttgtgtattttggacgtttttattttaggtttaaatcgtttttattttaggtttaaatcgtttttattttagtttaaatcgtttttattttaggtttaaagcgtttttattttagtttaaagcgtttttattttaggtttaaagtgtttttattttaggtttaaagcgtttttattttaggtttaaatcgtttttattttagtttaaatcgtttttattttagtttaaattatttttaatataggtttaaattatttttaatttaggtttaaagtatttttattttaggtttaaagtatttttattttaggtttaaagtgttcgtaatttaggtttaaagcgtttttattttagtttaaatcgttttattttaggtttaaatcgtttttattttaggtttaaattatttttattttaggtttaaatcgtttttattttaggtttaaagtgggaaggagttatagggaaataaacgggggaggtacggatgattaggatgagggtttttatgatttatttttttttaggggttattttaagagttttttaaatttttattattttttaatagagatggggttttgttgtgttgtttaggttgatttttaatttttagttttaagttatttttttattttagttttttaaattgttgaggttataggtgtgagttattgtatttggttttttttaggagttttaagaaaaaaaatgggaatagatttgtgtgtgtgtgtgtgtgtgtgtgtgtgtgtgtgtgtgtgtgtgttttgagaaagagtttcgttttgttatttaggttggagtgtaatggtacgatttcggtttattgtaattttcgtttttcgggtttaagtgttttttttgttttagttttttgagtagttgggattataaatatgtaggttgattttgtatttttattagagacggggttttattatgttggttaggttgatttcgaatttcggattttagatgatttgtttgttttggttttttaaagtgttgggattataggtttgagttatcgtgttcggttaggaatagatttttttttgtagatgatttttgttattattgaaaatggatgtttatgtataattgaattgttataacgttttattttaaaaagtttttttttgagaaaatgtgatttttgatagaggagagattgtttaggttttatttattgttagtataaaggtagagtaggggtgtggcggtgttatttttttttgagatagttttatttttgttttgtttaggggtttagaagtttggtttattcgagtttatagaggggtttggagtggttgttttatattataggtggggtttgtaaggatttgaaatgatttttgagaaggcgggtgtggtgggtgtattttaattattaaagtaataataatgatatattaaatagtgtttgtttagattttgagtgtttgtttaaatatttttattttgtgatttgttagattttagtataataatttaggtaaaagaaaaaatagttgggcgtggtggtttgtgtttgtaattttagcgtgaggttaaggtaggaggattgtttgagattaggagtttgagattagtttgggttatttgagattttatttttgaaaataaataaattaataaaagatttttatgttttatgttttttttatatttaggttttttaaattatatgtattggggaaagtttattaagagaagtttttggtcgggcgtggtggtttacgtttgtaattttagtattttgggaggttaaggtgggaggattataaggttaggagttcgagattagtttggttaatatggtgaaattttatttttattaaaaatataaaaattagtcgggcgtggtagtgtatgtttgtaattttagttacgtaggaggttgaggtaggagaattatttgaatttgggaggtagaggttgtagtgagttaagttggtgttattgtattttagtttgggcgatagaaaaagattttatttttaaataaataaataaagggagagaagtttttgggtttttagatatatgggttagtgtttatttttgtaaagttgttgtgtttaaagaggggttgtatttggtggaattggggtaaaagagtagggagggtattgggtagttgatttggtttttattattggaaaggggttgtgttgttggtgttttgagttggttttataaggaagatattgtatagggcgttttaagtttgttttttttgtttaggtttatttttttttttttaggattagggagtttcgttcgttttttgttttcggtatttgttttttggtttgtgagtattgtatttttttttgtttggaacgtcggtttatggtgggttttcggatttttgttttttgttgttttttgttatatttcgttaaagtgtgttttatttatttattgttattattttttgaaatagagttttgttttgtcgtttaggttggagtgtaatggtgtgatttcggtttattgtaattttcgttttttgggtttaagcgatttttttgttttggtttttcgagtagttgggattataggcgaatgttattacgttcggttaatttttgtatttttagtagagatggggtttttttatgttggttaggttggtttcgaattgatttcgggtgattggtttacgttagttttttaaattgttgggattataggcgtgagttattatgtttggttaattattataatattgatattataataatattatagttagataacggtgattaacgtttgtaattcgaatattttgggaggttgaggtaggtagattatttgaggttagttcgagattagtttggttaacgtggtgaaattttgtttttatcgaatatataaaaattagtcggagcgtgatggtaggtgtttgtaattttagttatttgggaggcggaggttgcggtgaattgagatcgtgttattgtagtttaatttgggtgatagagtaagattttattttaaaagtagtaataataataataataataataatattatttattgagttttaattttgtgttaggtattgtgttagtatttgcgttatgtgattttattgattcggaataatttatgagtaagtattatttttgtttttaaggaagttgagatttaggaaatggaagttattttttagggtttatagtaagggtttggcgaggtttgcgtttaaattttgattatttgattttaggtttttttgttttttttgttttttaaaaatttaaatatttttatttgggatgattttagatagttagattttaattgttttttttttttttgagtatgttttattttaaaattatataaagataatttattttttaattggagttacggaatcgttagatgttttggagatttttttagttatttttttgttggatttagatataggtttgaataattaggtttaaggagttgaattggagtcgttcgtggttagaggtttttttttgggaatagtagtggcggtagcggttgcgttgagtttggtaatttgtttaagagtaggggatgtttaggttgcgttcgttttttttttatgaacggtttgttttgcgttttttttgtgttaagggttgttaggtattagatgtttattttaggaaattagaaaaataaatagtgtaaataaaataaaaattttatttaagaaatttgagatagatgttgttttttttatcgtttttttatttttatgttgggtttggagagagtgggttagtatgttttttacggataagaggttttggggtatttaatttggatggaattttttttattttttttttgtttggtgttagggggtagaaggtaggggtggtgtttatttggtttagggaggaggatagggtagtttttgtcgtcggtattttttgtagagatgttttagttagaagtgattttatttttaggaacgtgtgttttgttttttgttgggcggtttttttttattttttattgtttttatagtggggtgtgttagatttatgggtagagttttggtttatttttagtttcggatagtagaatgttttagtagtgtattgatggtgtgtgcgtggggatgtgtggaataggggatagtgatttcgtgtgcgttatatgtagtgcggtttttagtcgggtgtgtgaagggggtgtttatggttatcgtggaagtgagtttagttggggttggagggtttaggtttattgtatgttatttagtagttttgggagtggggtttattttttttttcgtttttttttttttttggttttgggtagtttatcggagttgtattttgggttattttttttggttttaaggaggttgttatttttgggaggtagatgttggtttttttatttttgttttttggagatttgcgtcgaggtttgtttttttgtttggagggattggttaggaatttttgggtttttttggtggggtttttgttgtttagtagtgagtagagtgagtgggtattaagaggaggatgttgggtgaggttacggatatggttggggtaggttgggggtgttggaggtgaatttcgtagttgtgcgattttgggtagtttgtttagttttgggtttcgtttttttttttatgaaatggggcgggagtatttgtttgttggggttgtgggttgggtgaatcggagttaaggtatagtttatagtttgtcgttagattttcgtaagtagaagtgggtgtttttgtttagcgtttttcggttttttttttaaggtttagttttgtttttattttttttatgaagtttttttggttattttaggagttacgatttatattttttttggagttttgtgttatacgtattttttacggtgttgttttttttggaggatgggtttaattaaaattggggtttatttgggggttttttttagtattagagaagtttaggtttagtagagatgggtattttgttaatattagtttcgcgaaggatatattgtgtttattttgttgttagttgttgagtttggtgttttgtagttatggaatatgtgtataggtttgggttgttggatacgaaggttagatgggtagtttattttgttttcgttttgagtttttagaaataagttggttgtatttatttttatttggttatagtttaggagtggggttgtggaatggatggaaggaaggatgagtgggtgggtgggggggtgggtgggtgggtggatggatggatggatgatgggtggatgggttgatggatgggtggattaggtggataggtgaatggattggtgggtgggtgggtgggtgaagggttgaataggtgggttgggtggatgggtggatggatgtgtggaggggtggtggggtggatggggtttatgggtgaatggatggatggatgggtgaatggagtaaatgagtgggtggatggatggatggatgttgtaagagtttttttggagggttttagggaggaattggtatttttgattagtagttagtatggtgattagatatagggaggtgtttgggtttgtttgattttttattttattgttggtgggattgggttggttatgtgtttttgaagttttttgaagggtggttgtatggtattgtttaggggatatttttagagtgtcgtgttttatagtaatagggtggtcgtttgtgtttttagggtcgttttttttggtagtttttcgggtttgtttggtttagtattttagtaaattttttcgagttaggatttgtttgttatgagtttttttaataagtagttttaggttaaggtttgtgtgtgggtagagggagcgtatgtcgcgggaggttgtattaatttgaggttttgtttttgtttttttttggggtaaaaggtaaaaatagtttgttttattttatttttaaatttagttcggttgtatttagttttgggagtgaagggggttgggttaggattgttcgtgagttgtagattttggtgtagggaaattttgatttataagacgggtggatatggaggaaggaggagatttcgtttagtagagatacgtttgggtgtagtttagtttggagtttgatggacgtgggtttatttgtgtgtaatttttatttattgtgtggttatagggaagtgatattttgtggagatttagattttttatttgtaaaataggggtagtagggtttgggggaggatgtgtgtgaaggtttggtttagggtttttttagtagttagatagtagtggttgttatttttttagcgtttagggttatttgggggagtagggtttttgtttttagatgggtttcgtttttggttttggaatttatagtaggagtaaaggcgaggatatttttggtgttaattatttattcggagggagagcgttagtggttttgtgtgatttttgttttttgtttttgtttttaggaggtacgcggatttttagtggtcggtttcggaggtttggtgattttagtggtttaggtaggtggttcgtttcgttttggttttatttagtttatgggtgtgtttgtgttggggtttttttattttggtttgggatttgtttttttatttggtttttttggatgagtggggttatttgtttattttttagggagacgtagtttttgacggttttggatttaggtggtttttaggtttgtcgacgttgttttgttggagatgatttttgtgggggtaggggtagttatttttaggtttagggagtaagttcgtgtgtgcgggatagaggagagaataggagatagatagggttggatgatttggtttgagatgttgaggggatagatgtgttatggataggtggttttggtcgtgagtttttcggtgttggtttagtatttgtgggttttttgtaattttgtaggatggaagatgttttaggatagagtagatacgttcggtgttatttaggaggaaataagtgggtttttggtagtggttattgtgttattttttgtgttttttttatgtgtttggaaattttttatattaattagtagggaagggaaatagatgtatttattagagttttggggttggtcgtttaggatacgagttatagtttataggtttgaagggattttattaatattgggtgtagtttgggtaagggagtgggatagagaggttagggttttgtttttagtttttgttttttagggttgagtttgcgcgttattttttttttattgggtgtttttgattttttttgtttgattttagtgtggttatgttagtgtttttgtttttgggagtttacgttgtttttggttgttatttttagcggttaggttgggataggtgtttatttagtggtttttttatttggagaggatgatgggttatagtaatgaatggatttattttttttaggagacgaggagttttgagaagagtagagatggcgtggttatttgtgtatatgtgttgggggttaattgggtgttagatttttggttgttattatggtggtagataggtagggattgtgtttttatgaattagttattttagaggagataaagttattaaaggatacggattcggagttaaatttatataaatagagcgtttgtggattagggttgtttttagaataaggtgagatagtcgttttgttaggataaggcgtttacgggggtaagggtatgtgtttatttggagtcgttatttttatgttttagattagtttcgtttaatagaattttttgtgatggtgggtttgttttatatatttgtatttcgttattttgtatggtagtcgtttagtcgtttgggtttattgtatatttaaagtataaatgtttacgtttattttatttatttatttatttgtatagaattatttatttattttaaatggatttttatttatatttacgtgtggttagtggttatgaaattgaatagttttagattatattggtatttgagattttagaattttagatttaaagtttgtttttgattttgagtttgtttttgtggggatagtatagacgttttttaagtttgttttttagaggtggatgtagtgttcgtggattgtgtattattaggtttggatagtggagagggtggttttttatagggagtgggagtggaggggatgtcgtgtttatattgagtgtatgtgaggttttttgtagtataggatgggattgtatgtgggaagaggggggtgatgttttggttggaggtttttgggtagttgtatgatttagcgttgtggttaagaggggtttcgtttatcgtagttatgttgggtattaattattggatagtttagtcgttgttgtgtttttggggagttttttttcggtttcgtatttgatttgtttttttattttttttttttttattggttagtttttggtggaatgggtggggagggttttttagtttttgtgggggttgtattttgggaatttggtattttgggttgtatggatatagtttttttcggcggttgtttttttttgtttagattggttggttttgtgttgttagtatttggtagttacgattatagtttagtttggaagtttaaggtataatttgttgaattttaaagttgtaagttggtgatttgggtttgcgtgggattgtttgttgatatacggggttttttttttgtgggtttttgtgggttttggttcgagatattttttttttatttttttggtttttttttttttttttgttttttttttgttaagattttggtttaggtaggagtttatttttagacgttttagtattttcggtttttttatttgatattttttagacgattgtttgttattttatttttttagtttagtttttttgtagatttatatttggttaattttttatgtttgggatttttgttttttttagaaggacgaaggtttttttcgaggttgtgtttgggattgggttagggatgatatttttggtaaaagtttaaatgatattatgattaacgttttggttagtttatatattttttttttttttaaaaaaaaaatggaatttttagagttataaaataaaaatgtaaagaataaggtaataaaatatttgtgtatttattatttcgtttaagaagtgagatattgtaggtgtagtcgtagttttgggtgattttttttattttagttttatttttgttgcggtgttcgtttttttggattgggatttggtttcgggtaggtatatttgtgttgggtagtggtgtgtttgagaagtttaggtttttttttttttttttttgagatagagtttcgttttatcgtttaggttggagtgtagtggtattatttcggtttattgtaatttttgttttttgggtttaagcgatttttttgttttagtttttttagtagttaggattataggtattcgttattatgtttggttaattttttttgtatttttagtagatatagggttttattatgttggttaggttggttttatatttttgattttaggtgatttatttgttttggttttttaaagtgttgggattataggtgtgagttatcgtattcggtttggtttttttttgtatacggttattagtatcgtgtgattgagtagtttaggtttgtttttttttgaatgtcgttattagtattatatttttggtgttttattggagttagtggttgttttgtttgtgtttataacgtgacggcgtggagatttattcgtgtagatttacgaagttttggtttatttattttggtagttagcgagtgtttttttgtgtggggaggtagagtttgttcgtttcgtggtttattggtgatatcgtcgaaggttttttttgttattagtgttgtcgggaacgtgtgtttttttaggtggatttggttgggttgtggagatgcgttttttagtttttttagatgttattattacgttttttcgagtggttttttggtaggtttttttatgttcgtttattttttgtgttttaggtagtcgtttttttgattgagcgtttagcggatttttgttttgttttttacggtgtacggagtattttattttagtggtgtttgagtttttttttttttggtttttagatttcggttgggatttttggagttaatttttttgtttgatatttcgtgtcgttaggttttgtttttttattttttaatatttttggggtgtgtggttttttttttagtgtttttattattttttttgttttaggttgaatcgtgttttttataaatttatgtttattaaaaattttagaatgtgatttgggagttggagatggggtttttgtagatgtaagtagttaaggattttgagatgaggttattttggattagggtgggttttaaatttaataattggtgtttttaaaagaagtagagaggttatagatatatcggggagagttacgtgaaggtaggagtagatgatggagtgacgtagttttaggttagggagcgtttgggaagaggtaaggaaggattttttttttattttattttagagtttttttagggagtgtggttttgttgatattttgattttggatttttggtttttagtatgggagagaattcgtttttatttttttaagttttatagttgtggtttattatggtagttataggatattgatgtattttttatttggtcgttgtggatggacgatttcgttcgtaggaagttttttttaagtattgtaggtgtttttgtttttataggggacgtttgtataagtaggtgtgaaaaaagggttttgtgggggtaaggtttgggttggtgttcgttgtttttttttattttatgttagtttttatgtttttttcggtaggagtgtttggttttatttggtgaattagagttaaatttttttgataattggttgttatttatttaattgttattatttttaggagatagaaaatgttagaagggtggggtttgtgtagtgttttttcgttatttttttagggtatcgtgttacgttgttttaatgtatagagtagttgtttaaagtgtgtcggacgaataggtgttttatgtttagttatgtagataaaagtgtgttacgtggagggagttggtcgtggaagagattattagtattttggttgttcgaggattttgtttttgggtttttgtaggtatttttagtttattatttttttttttatttatagttatttattttttttttatttttttgatattagttttgttatttatttaggtttgtaagtaggaaattttagagttgattttgatttttgtttttttagtatttttaggttttaataggttgttaagattttattaattcgttttttgtatattgatttttggataggttgtttcggttacggttatgttttggttgggtttttattatttttttttggattagtaggtgttattttttttatttttgttttgttgtggtttttttttttttacggttaatatttagaggacgattattatttttttttttgtgtgttggggatcgggtgataggatttttttattcgattatttttattagatttgggtcgggtttttttatttatagagtttttagttttcgtttttaaagtttcgagggtggattcgtgttgtcgtttagtttggttttgatatcgttttttagtttggagttttttgtttttgcgtttttggttttgagtgttcgggttttttttggatgggttgttatttgttttttggaaagtagggtttttatgtttttggattttttagttgatttagtgattttgggttattttgttatattttttttattagtttggttttggttatttttgtgttttttatagtttcggattagagttacggcgggatgtttttttggtgcgtggtaggtagttaggaaatattgttggattgattttgataggagatgtttgggagaattgtttaaaaaattagtttaaaatgtaaatattggtttttttttgcgttggttaaagagtagtattttttcgtttgtttttcgggtaagaaattgatggcgaatgtaatgtttttagggaggagaagaaggtgataaaaagggtttgtataacggggtatacgttaggtatttgtgattatttaagtttaaattataatataaatgcgaaattttttgttttggtagtttttttatattgtaagcgtttattgttatatgtggttgttatattgattacggtagatatagaatattgatattattgcggagagttttatgggggggcgttggtttagattatttttacgttggatttataaatttattgtttatttagtgaacggttattgggtatttattgagtaagtaggatgaaagatattcgttttcgggggagtttttcgttggttgtagagaagtttaaatttaggggatttggggtaaattttgtaagggtttttggtttttgtatttttagatttttttcgttttgtaggggtagtcgggggttttttttaggaatggagcgttagttttagtttttgttaggttatagtttagatggttggttgagtacgagtatgtgagagtggaattgggtttaatcgggttgttttttttcgttgttttggtttttttttacgttgatttggaaggatttttaaagtaataggtttgtttaggcggtttgtattagtaaattttgtagcggttttaagggtagagatagttggattgtatttatttaggaatagttaaagtttgaggtataataaaaagtggagaaagattttagagaggaatgtagttggttttagtttgggaattcgttttgtttgggaggttgtaggcgggttaggttggggttagtttggagggttttggttggttttgttggtaggtatagtagtagggttagtaggagggagtttaggacggagtttttttatttttaatttagggaagtaaattttagtggttgagtttgaggatgagtaggaaatgaatggaaaagtttttttttttttttttttttttttaggtagggtttttttttgttttttaggttggagtgtagtggtataattatagtttattgtagttttaatttgttaggtttaagggatttttttgttttagttttttaagtagttgggattatagttgtgcgttattatgattggttaatttttaaaagaaatgtttttaggttaggtatggtgatttatgtttgtaattttagtatttttggagtcgaggtgggaggattatttgagtttaggtgttttagattagtttgggtaatatgacgagatttcgttttgattaaaaatataaaaagttagttgggcgtggtggtatagttttgtagttttagttattcgggaagttgaggttgtagtgagttgtgattacgttattgttttttagtttgggtaaagggagtaaggttttgttttaaaaaaaaaaattttttttttttttgaggtggagttttgttttgttgtttaggttggagtgtagtggtatgattttggtttattgtaatttttgttttttaggtttaagtgatttttttgttttagttttttaagtagttgggattataggtatgagttattgtgtttggattttttttttttttttttttttttgtagagatgggatttttttatgttgtttaggttggttttgaatttttggttttaagtgatttttttattttggttttttaaagtgttggaattataggtgtgagttattatatttagtaggaaaagttattttttaaagcgagaggttgtgcgttttttatagtttggcgtttattagtatggaggatttattggaacgtgtgttaggtgaggggatatggaagatggtagtaaattcgagtttagagtattagaaagtatgtttttagttaaagatgcgttttttttattttcgcgtagtatttttttttagtgtgtatttttggagtaaggtggggtcgattttacgaagattttttttcgaaggtttttgttgtttatattagtgttatttggatcgtttgtttttttttttggatggttggattagttttagggttttttggtttggtgtggggagtatagtttattttggggaatgtttggtatgtgttttttttttattgggtattaggggatgaagttgtgtttcgtggaaggggatagaggcgttggtgtttaggatggtgtatttggggcggttgaattggatttggtttttattgggtttttgtggagtttagattgttgtgagaaggggtggggaaaggtaggtgattcgtattttttatttttgttttatatgggaataggggtttattttgtatatatatttagtttggagtatgaatttttatgaagaggaaaatttttattaggttttgatgttaggattgttcgtgagggtcgggtcgtgttttggggtaaggataggagtggagggggtaattagggaaggttttttaatggaggaggtatttgatagtattttgaaaaagaagtagtttttaggttaagttagagattgaagaatgattatttaattttttttttttttttttgagatggaatttcgcgttgtcgtttaggttggagtgtagtggcgtgatttaggtttattgtaatttttattttttaggtttaagtaatttttttgttttagttttttgaatagttgggattataggtatgcgttattatgtttagttaatttttgtatttttagtagagacggggttttattatgttggttaggttggtttggaatttttgattttgtgatttatttgtttcggttttttaaagtgttgggattataggtatgagttattgtattcggttacgattatttaatttttttttataagatgttttttggttgacgtaaagtaggttgagtgagtgtgatattttttttttgtttgtgggtttcggtttttttagagttcggttagtgttattggagataaagtggttttcgtttttttttttcgttttgttaggtttagtttgtgtcgttgagttttattttgtaattaagaggagttgtgaattagtgatgttgatgtcgtagaaaagtggttaggggtttatggggggtgaaggatagggatgtcgttttgagaattgtttggaaggggtttttgggtaatagtgtttattttagggtgtgggtaggttggggtggttgggagttgggtttataggttggtataattagagttttttaaagtcgtgggtttgagggttttgtttttttgggatagtaatttttggtttaatttgggaaaaggtgggttaaattaagttcggtttttttattgtaggattatttagtgcgtttagtatgtaaatgtgtttttgaatttaagataggattatagaaatttttttagtgtttttttggagggagggatcgcgggggatttatcgtaggggtttgggtttgtattggtttggtgaagtgtttttttagtgtttatattatgcgcggtgagaggttggttttcgttttttttattttttgttggttttattttattatttttgtattcgttttttagtcggtttatgattaatttttgtttttttagagttaatcggtgttgttaggttttttattttaagtgatttttcgtttgggttaaaatgtttggatttttaggtacggaggggagatggattttaggttaaattatgttgggtaaaattgagggttaaggttgtgtttagtaagtgttttagttttggtcgttaaatttatagtgtgtatagcgtgtaggaggtggttgggtgaatgaatttagttatagttcggttttttattcggggttgtttttaagtttttatcgttagttaggttgggttagagtttcgtggggtttttttgggtttttttgttttatagtaggagttcgtatggagagtttcgagtgaggttaatgggtttttttttttttttttttttttttttttaatttgagatagggttttattttttttatttagttagggtgtagtagtgtaattatagtttatagtagtttcgaatttttggttttaagtaattttttcgtcgtagttttttaaagtgttgagattataggtacgtgttattttgtttagttggggtttttgttttttatttttttttttgtttttaaatttaatataaagaaagatattatatttataattagaaaaattaataaggaatattattttaaaattggaaaagggattaaagaaataaattaagaaatttttgcgatttttgtttatcggagttagtggttgttagtggttggtttaatataatgttttaggaagaaatagaataatagaaagtaattttagtgagttgagttttggtttcgtttgtggcgttgtattagttttttgtagttgttgtaacgagtggttataagttggttgggttataataacgtttagttatttttttatagttttgtaggttatatattcgagattagggttattaggttgaaattagggtgtttattgggtatagttttttggaggttttagggtaggggtttttagtttcgtgtgttttattaggaattggtttgtatagtaggaggtgagtgattggtaagcgagcgaagttttatttgtatttatagttattttttattgttcgtattattgtttaagttttgttttttgtttgattagttatggtattggatttttataggagagtgaatcgtattgtgaacggtatatgtgagggatttaggttgcgtgttttttatgagaatttgatgtttgatgatttgttatcgttttttattattattagatgggatcgtttggttgtaggaaaataagtttagggttttaattgattttatattatggtgagttgtataattattttattatatattataataataatagaaataaagtgtataattaatataacgtgtttgtggtcgggtgtagtggtttatatttgtaattttagagtgaaattttgttttaaaaaataaaaaataaaggttaggtatagtggtttatgtttgtaattttagtattttgggaggttaaggttggcggattacgaggttaggagtttaagattagtttggttaatatggtgaaatttcgtttttattaaaaatataaaaattagtcggatacggtggtaggcgtttgtagttttagttttttgggaggttgaggtagaagaattgtttgaatttaggtggcggaggttgtagtgaattgagatagtgttattgtattttagtttgggtggtagagcgagattttgttttaataaaataaaataaaataaaataataaatataatatatttgaattattttaaaattatttttttattttttggtttgtggaaaaattgttttttttgaaatcgattttaggtgttaaaaaggttgggggttattgtttttatcgtttgtttttttgagtttttggtggttgtgggtgttttttggtttgtggttgtatggtttttatttttaatattagtatttatagattttttcgggttttatttttatttggttatttttgtttgtgttaaatttttttttgttttcgttttgtatgagtatcgagattgtttttagggattatttagattatttagggtgttttcgttatagtaagatttgtaattgaattatagatgtaaaaatttttgttttaaataaggttttatttgtaggtttagggattaggatatgttatttttggggttattatttagttttttttcgtgattatgatttttttttttttttttagttttttatttcggttgagatgttgtttttattttttttattgtttggttgtttgtggggttgttttttaggttttttgggaggaggtggttgtttgatgttttttagaaggttgggaatggttttttttattttttaggaagatgttttttttgttaaggagattgtatttggggttttattttaggtagagagcggacgggattgtggtttgaagtggtattttagggtttttggttttgttatttagtcgagggttgtgtatgggttttatttggttataggtaatttatttggttttgtggggtagggattgtaaatttagaggtttgcggggtgtgtcgaggtagaggggtgtaaatattgtaaatttgttgggggttttggggagtagtatagattgaaaagtgttttgtttgaagagtagaattgttttatattagttttgtgcggttaggtaggaaggttttcgtggtgcggttacgcgtttttttttttttaatagaagttgatagtttggagtttttagagagattgtttgagtttttagttttggtataaatatatattttttttaaataggtttgggttaatagaattagttttcgtgtttcgggtttgaatgaatttttgaggtgaagtttaaagatagagaggatgtttttgatttttattttagggatttatattgtaaatttttatttgttttgttgagtttttggttttagtatggattttgattatgtgttggtggggattttttaggtaagtaagtagtttttgaggatttcggatgaatagtggggaatagtattgattttttagtggggtttcgagttttcggagaggaagattcgtttttttttaggggacggttagagatttattgatttatgcgtgtgtggtaggaattttttaggaagttttcgtttcgttcgttttttttgtttgggcggggacggtaattgtttttgttattgtagattaatgggacggaggggggtgattttttagggttttttttgggtaggtgtttcggaatttttttttagtacgttggtttggggtacggtcgttttttttgtttagttacgttggggtatagggtgaagaagggttggggttagtttaggatagaggaaggcgaggtaggtacgtaggaattgggttttttaaatttttaagtttaaggaaatcgtagtatcgcgggatagggaaaatgaaagattttggaagtcgttaggaatttgattttgtgagttggtttttaagagtttaagttaagtatttttaagtggatattaaaaaggagtagtaagtttcggggcggcgggggttggaggaggtggagagaggaggttgtcggaagtcgtattcgggatttttgtagttatcgattagatcgggcggtcgggattttgggattttcgtaggtagattcggtggtttgtcggatttttcggggtttatttcgggtttttttttttgttttttatttttggattttttttttttgtttttttttttttttcgttttgaagagataatgttattttagtttggagtataaatatatgattagtatatggaaatgtggtaattcggatgtattcgtgattgtaatagattgaagaaattagattagataaagagtgtttttagaggaggaggaggaggaggaggaggttgagagagggagggcgacgggggtgagaaaggggaggtcgtttttgagcgggacgtcgggattttcgtcgttgttaaatatattcgtaggaatggagagggatcggattttaggtacgtagatagttttttttttatcggtcgttttttattgttttggattcggggttttatttatgtttgggggaataagtatgtaaagggcgtttttgtttattttttatagaaatattttttttttttttgacggttttaagttcgtgggatgaatttcgttttagaagttaagtttttttgagtttggtttttatttaaattcggttttttttttttttggttattttttttttattttttagtgtgttatttttgtatgttatggttattgttaatgttgaggttgttggcgtcgaaattttgggagggtgtgggggatttgtttttttggttcgggtttggggcggcggcgtttggatttggttggtggttggtttgtttattgtgtggtttgttttttgtttttagttaaagtttgtttttaaggttgtttcggttttttatttaaaatagtatttttgtgtttttttggtagttgattatagagggggaagttttcggcgtttagaggagtttggcgtgtgtgtgtacgtgtgtgtgtatgtgtgtgcgtgtgtttatttacgttggtagtttttttgtcgtaggtatagatttattagggcgtgaataggtaaatgaagagaaagggggtttttttgtttttagtttattttagttttttaggtttttttttttaggtttagtttttttggtttttttatttatatgcggtgtcgtggttgttattttacgtggttagcgtcgttatcggtaattagtagtgatgatagtttttgtcgtttatgtcgttttttgagtttagcgttgggagatatggggtggttgagttaagttttaggttttgggtattttgaagtgatttacgggttatggagcgggaggtcgttaagagtgttaatttttacgtgttttgggttttggtttgttggttgttattatgtgtgtgttggggggtttttgagaggtttgagagagggaggtttatttcggtggtttttttttaggacgtgtggttttttttattattgtttttagggttatatttttttttttttttttttttgagacggagtttggttttgttgtttaggttggagtgtagtggcgcgattttagtttattgtaagtttcgtttttttagtttatgttatttttttgttttagttttttaagtagttgggattataggcgttcgttatatttttttgtatttttagtagagatggggttttatcgtgttaattaggatggtttcgattttttgatttcgtgattcgttcgttttagttttttaaagtgttgggattataggcgtgagttacggcgttcggttttagggttatattttgattgttacgttgggattggtggagcgggtgtgtgttgtgtcgttgagtatatttagtcgggtatagtaggcggattttaggagggggttaggggagacggtagaaggtttgggtggtagtgaaattgtattttatttgtttgagttcgggggtttaggttcgttgggacgggtgggtgtggagtttagcgttttgtttttcgtttagtaggagtcgtagggtagggagcgttgagagggattttcgttaggtttgtatagtggagtcgttttcggagtgattattttattaggtagtttgggtagattatagtgggttttttgttttttgggttattagttttaggaggacgttattttattcgtttggttggtaggggtttcggggagtttcgggttcggtttttattttatagatgatttagtcgaggtttagatgggtgattagtaggggatttgagagttgagtagagaggcgtgggtttgggggtggtgttttttggggagttggaagtgatggtatttttttaggtttataaaatacgggttttttatgaattgaataaaatattttttgaaagtagttagtgttgtgttttagagattattttgatttttgttgtttttggttgaggatagtatagttagggatgaagcggggattttttttcgggttgtgttttgatgaaagatgttttttataaaattttattcggatgtgtttttatgtaagaaaacgtatatttttagaaatttagttgtaaattggttgtttttcgaatgaatacgatagtttcggagttgttttttttaatgaggttttcgttttgggtaaattttagcgttggtttttaattgttattgaattttcgtatagtttttggggaagtgattttttttttgtttttgttgggtggttttgagtaagttatttggtagttttgggtcgtagtttcgttatttgtaaggtgaggggtgggagcggtacggtttttaggtagcgtttttattttttgcgggtttttgcgcgtgttttgagttttgtgggcgtttttttttttattgaggggttttttttttttgtagggtatggtttacgtcgcgttgttaggttgtaagttattgcgagagttgttttgatttttaagtatgttttggtttgaggaggagttatggggaggacgttgtgtttgtgtgatagaggtttgttcggtagatgtcggttcgttgatttttagacgtggttgtgggtgttttatgttttattgggttggcgtgtgaggcgtgtttagtttaggttgttttatagttgtttaggaagggtttgtgggagggggtggttttattttggtgagtttacggtggtttgttagttttagggaaggtttaggagttttaagatttgtttttttgtttttttttcggtagtgtttggtttcggtttggtttgtgaacgggggtttgggtattttttcgttttttttgggggttgtggtttttttttgggaaggtgttggagggtttgttagtagggtcggtatgagttatggagtggtgattggtcgttgaggtatggaaggttattttttttagttaagggtcggagttttttttttgttttggaacggttttgtggtttttataaattaagtagttttattttgttttaagagtttgtattttagtagggagagagtttttaagaagggaattttttattggggagttttgttgggttgggaggttaggaataggttacgagggagggttgtaggtaggggaagtggtcgtttgtgtatggttatgaatgtaggttcggggttttggagggggtttggttacgttgtcgttggacgtttgtttttattagggtttatttgatgtagtacggtatagggtaaagtttagttttttttacggggtttttgggttattagtgggcggggaatcgaggttttttggagggcggtgttttagtttttattttttttttttgtttttcgttgtgttgttttcgatggtttttgttattttttgggagtttttatttttggacgttcggtgtttgttcggttttaatttttttagttttgtttttttattttcgaggtgagaggtttggtttgacgcgttttgtattcgttttttgtttagtttcgtgggaattttggtttttgtagtggttttttggggttgttattattaagtgttataaattgggtggtttaaaatattagatattttttttttcgtcgttttggaggttagaagttcgaaattacggtattagtaggtttggtttttttcggaggtttcgagggggagtttgtttttcgtttttggtagtttttggcggttttcgaaatttttggcgttttttggttcgtggttatattattcgatttttgttttcgttgttacggggtttttttttgtgttttaaatttttttttgtttgttttttatacggatagtttttttcggatttagggtttattgggtaatttaaaatggttttattttaagatttttaattttataacgtttgtaaagattttttttttaaataggttatgtttataggttttggggtggatgtaaattttaggggttattttttatttttttgttgttttcgtgtgtttggatgtatagtatggttttatgttttagattttttgttggatttttttggttttttggggtggtttttggttttttttattcgtttttgtgtttttggtgaggtgtcggggtcgggtttagtttttgtaggaattttggggatagtatggagtcggtaattttttattaggcgtttttttatttgtttagagtttatggttgtgaggggtttttttttgtggttttgatttgtaattttttagtggttagtgatgttgagtattttttcgtgtttattgtttatttgtatatatttttgtagaaatgtttgtttaagttttttatttgtgtttgatttggatgattgttgttgttgagtgttaggagatttgtagattaatatttagatattaattttatatttgatttatgatttgttgttattttatggattgttttttttttacgttgttagtgttttttgatatgtaatttttttttttttttttgagatggagtttgattttgttgtttaggttggagtgtagtggtatgattttggtttattgtaattttcgtttttttggttttagcgatttttttgttttagttttttgagtagttgggattataggtattcgttattatatttagttaatttttgtatttttagtagagacggggttttattgtgttgattaagttggtttcgaatttttgattttaagtaatttattcgtttcggttttttaaagtgtcggagttataggcgtgagttatcgtatttaggttgatatgtaaatattttaaatttttatgacgttttattttatttatttgtttttttgttgtttgtgtttttggcgttatatttaagaaattattgttaaatgtaacgttaggaagttttttttttgtgtttttttttaagagttttgtggttttagtttttgagtttaggtttttgatgtaagttgagttgatttttgtatgtggtgtaagggttggtttagttttatgttttgggtttttgatttattttttttttttttttacgtttagttggtttcgttgggtggcggggaggagtggggaagtttcgggttgggtttgtattcgattatttttttttaggttagttagggagttttagtttttgtttaggatttggttggacgtgttttttatcgggaaagtttgggtcgtttttttaggttgatggtagggttagttcggggcgttttgaggtttgttttgcggatatgttttttgttttaggtggtgtggttgttcggtttgcgtgtgagattagttgtttgtgttttaggttatggaggttgagtgtttttagtttgtttttttgttcggttttttttttggggaagtttttgtagtttattttttgttttcgtttttgttatttgtgtttttgtttgttttttgtttggaggtggttatttttggggttattttttatgatttggatataagtttttattttgaagttattatttaaatttttgtgttttaaattttttttatttattatatgggtttttattgtgattaatttagtagttgatgaagttttttttggggtttttttagtaacggggagttggttttttcggaggtttggtttttttttaagtggaagtggggcgtgagggtgttagtttttttttgttgtttggtgttttaggttggtttgttatttttggaagtatttgttatttttatatagtattttatatttattttttcgttttttatttttttttttaaggggttatttttgtttttttttttatttaattttatttatgtggttcgtttagtaatttttgatttttaatatgataaaataaattttttttgtcggttatttatttatttatttagtattgggtgttttttgtggatttggcgttggggtttcgtggaggataaagttagatatagtttttgtttttatgggattgtataagtgtaagattatattagtaaacgtgaaatataggaagtgataggtgtgataaaggggattagtggtaggatagaatttgcggttcgtaggattaggttaggagggttgtttcggggggatattttcgggttgagcgtagaaggatgaggggagtaaattaggtttaaatttagtaggtagaggcgatcgttgtaggtaatcggtaatgtgtttaaaggttttggggcgcggggggttgaggtcggtagtacggtaggaagtaagattggggttgaaagagattgattgttatgttgtgaaatatatatttggtttttatttttattttttggtatataatttttaaaatttttggaatttttaaagtgatgtttttttggatgtttatgattgatagattagttggtagttttaggatggtttttagggaagattaggtagaattataaggtttagtattatttcgtaatttttaggtaggggagaggggttgaaggttaagtagattattagcggttaatgattgaattaattatgttttcgtaatgaggttttcgtgaatatttagaaggatggggtttcgggagtttttggatggatgagtatgtggaggtttttggagggtggagcgtttggggagtatatggaagttttgcgttttttttttatattttgttttatatatttttttttttgtattttttgtaatattttttataataaattagtaaattttatgagttttaggaatatgtgtaaaagaaaaaaaaaagaataaattatagttgttgtagtaagttaattttattagtattggtttttatttgtcgattttatttttggtaatgttttttttttttgggtttttgggattttttcggttttattattttttttgtagtggtttcgttggttgttgtttttaggttagtttatttttattcggtttgtttttattaggggttgaggtttttttgtttattttagttttttggttcgttttttgttttgggtatttttttatttcgaacggttagagtttttgaagtcgttcgttgtgtgttttcgtttggttttatgtatttcgtacggtgttttttagggttttttattggtaagggtattggtatagattttggggttgttttggtttaagtttattttgatttggagtttgagggtttttgagggggttttgaaggttagggtaggtaaggttggtatgttttgggtagtgggggttgggtatgggaggggatcgtgggtggggagattttttttaattagcggtttacgtttggagattgatttgggttttaggttacgttttgaaattgggatagagagtggcgtagattttagttcggagattttttttgtttgtggacgtttttatatttttattcgtggagttatttttttttttttttttttaaatggggaaattttgatttgaatattgaataaataatatattttcgaaattagcgaagaggtattggttttgaaattttgttatgaaagtttgaaaatgttttttggatcgatttgttggaatagacgggtgtgatggggttgcggggttttaggtggtaggaggcgttttcgtgtttagggtatttcgatgtttagagttttttcgtgtttagtgtgtttttgtatttagggtatttttatgtttagggtgttttcgtgtttagtgtgtttttgtatttagggtatttttatgtttagggttttttcgtgtttagggtgtttttgtatttagagtatttttatgtttagggtgttttcgtatttagggtgttttcgtttttagggcgttttgtgtttagggtgttttcgtgtttagtgtgtttttgtatttagggcgtttttatgtttagggtgtttttatgtttaggtattgtttttttttatttttttaatttttttttattaataggtgttagttgtgaaatgtttgttgtgtgtgttttttggttgagtttattttgtgtttttaagtttttgttagatataggtaggttgttttagtttttttggtaaatgttttgttgttgttgtttgatacggggttttatttcgttatttaggttggagtgtagtggcgttatttcgttttattgtaattttcgttttttaggtttaagcgatttttttgttttagttttttaaatagttgggatgataggcgttcgttattatgtttggttaatttttgtatttttagtagagatggggttttattatgttggttaggttggtttcgattttttgattttaagtgatttatttagtttggttttttaaagtgttgggattataggtatgagttatcgtgtttggttcgtttggtgaatgtttattgaggtttattatgtgtagttttttttttaggtgtttggtttgtaatgaggagtaataaagatatagtcgttggtcgtttgttatttaatagttggaattgagaggtagtttataaatgagtaaatttataggtggttttagatgaggattgtgaagaagttaagaataggttgttgggggtgtatatttgtgtgtgtggcgaggggattaatggaagttttttttgagtggtgatattgagttgaagttgtaatgattagaaggatttagttaggttaaaatttaagggaagagtaatttggtaaaggaaatagtaggtgtgaaggttcgaggttggagtttggggaaggtgggagtggttggagtgtgtttttagagacgggttatggtgatattaatgcgataggtagggttaggtcgtgtcgggttttggaggttttggtgagggtttgattttatttttattatggtgggattttagtgttttgtggttgttgagaatggttaggggtaggtagggaggtttgttagggaggaggttgttgtaggttttgtagttggagagggaggattaggatttttttagagaggaagttggagagggaggatttttttgattgttggatggatttatttgtttggttgttttcgttagtatttagtagaggttattggatgttgataggtggtcggttttgtttagttttgtattgttttgtgttgttttggtggttgtcggttttaggaggagcgtttttggtgtttgagtttagtggttttggttgtggtttggtatatttggtcgtgggtgaggttaaggtggtttggattttgggaaggttgggtatttggtagttttaaggtaggagttggggtgttggaggaggaagtacgtttatttttcgtttttttttgtttcgtgggatgttgagtttttgggtagggatatggtgagttttggtgtgatgtatttaatatttgttggtgtttttatttttaagtaggaattttggtgtttggtgtttgaggattgttgtttatcgttttattattttttaggtttttttttagtttttgattcggggtaaggtttagatatttagaatatttttggttggtttttggagttggggtgaggtagaattttttttttatatttatagtattagttaaggtttcggggtttggatattatttttgggaggggtgagtaggataagtgaggtttttagatttggggtggtttcggattggttaggtaggtgggtgggggttgtagtttatgttttcgttttaggtaatatagtcgagttgtagttttcgttttatttttagttggggttttttgtgtttattttttgttttttttttttttttcggaatggggggtggatattttaagattagttttttagttattttttttgttttttgttttttttttttcgggatagatttttgtgatcgttgggtgtttttgatgttttgttttttttgcgttttgtgtcgtgggtgagagagggtttcggggggattttttttttttggagtatttgttgtttcgggtgtttttgggggcgggtttttattttatattgtggagttggtgtaggaaggaaggtgtcgggagttagttttaatttacgtgttggttgtggtttttaaggtgtggatggtaggaggtggtgagatagggatttattgattatgggattgatatttttttatgttgatgtgggttttgagttataattttattagtttttgagttttggcgttgtttttggcgatggcgtggatttagttaggttttcgggtagttttttttggatttttttttcgtttttttttgggtagtgtttttgtttatttggaaaggatgggtaggatttggagataatagggatttaaagaagtcgggagtgggggtatttgtgtagtttattttgtagaatagataatttggttaaagtttaaagtttgttgttaggagtttcgtttgttttttagagagtatatggtttgattattacggggattgggggagaggtataggtatgtttgttcggtagtagaagggaatttcgggtttgggtttttttattttgtggcgttgtttttttttagagttgtattgttttttttattgtttttgtttggttttagtgtttatgtggtttgtggtttttagtttgggtttggtttttcgtaatttattttgtttagttttatatagtttgtttttttagttgggaatcggagtttatttggagttttaggtagtagattcgatgtagtgatgtagggttgttagttatgttagtaggttttgttgtttatagagggatgggtattgttgttgataataattaaagaattacggttttaggttgggtatagtggtttatatttgtaattttagaattttgggaggtcgaggtaggagaattaattgaatttaggagttttagattaggttgggtaatatagtaaggttttgtttttataaaaaataaaaaataataataataataaaaattatagttttagaatgattgattttagtatgtttataaagttaagggtttttagtgttttgggtttatgttattgcgttagagggagagaggaagaggttggggtgatgggtattggggtttatgttttttttggaatgggtggttttggattgtgtttgtgtgatatgtttgtcgagcgggggcggtgtttattgaggattggatgttgaggtgtgggtggggggaggttatgaagtattgggtatttttcgtgtattagtgtttcgagattgtagagaggggattcgtttagtttgggtagggaggcgggtggtagcgaggaaggggagaggaattcgggtgtagaaagttttttttttagtaggtggcgtcgtaagttttcgagagtttagtttttgcggggtttgtatttttattgaatttgtgggtagaggttgtttgggtgtagttttcgttaattgtgattgtttattgcgggcgaggggaagtggagtgtagagaatgtatcggagggtagatgattagttttcgtataggtacgggggtgttttttttttcgtataggtacggggggttcgagtttttggggtttttgttttaattgggcggggaaagggagggttggaagttgagttagggggaaagggggtggttttttgttattttttttattttattttttttatttttggttgataggttttaattttttttatatttttttaattttttgtcgtaaaattttttaaatatagaaaagatgaaagagggttgagtgtggtggtttatgattgtaattttagtattttgggaggttgaggtaggaggattatttgagtttaggagtttaagattagttcgggtaatatagtgagattttatttttataaaggatataaaaaattagttaggtatggtggtgtaggtttggagttttagttattcggaaggttgaggtgagaggattgtttgaatttgggaggttgaggttgtagtgagttgggattgtgttaatgtattttagtttgggcgatagaataaaattttgttttaaaaataaaataaaataaaattataaaaaagaaattatgaaagattttaaagtaaatatttatgtatttattatttagattttatagtaattattttgttgtttgttttattataaatttttttggttattagtatttacgttggttttgatgtatttaaaataagttgtagaaattagtatataatattttgttaatattttagtttgtattttattaattagagttcggtatttgtttgtgattatttttgtttttttttgaagtaaaatgtatatattttgagatgtataggtgtgaaacgtttcgttttttgaattttaataaaggtatttacgtgtattttagtttgattagaatatagaatattattattattttagtaagttttttatgtttttttaggtgtattatagtttttattttttttagggtaattataattgtgttttttttttattacgaaataattttgttagtttgagtgttttttagagttatttatgttgttgtaggtgttagcgatttgttttgttttattgttgagtaacgtttattgtgtgaatattttgtgggtttttagttatttttttgttgaaagatttttggttgtttttatttggaggtttttatgagtaaatttgttacgttggttttttttgtataagtttttttgtgtatatgggcgtttatttattttgtagaaatatttagagtaggtatagggtaggtatatatttagttttataagaaattgttagatttttttttaaagtggtttttttattttatatttttattagtaatggatacgagttttagttgttttatattttggttaatatttggtgttgttattttgtgaaattttagttattttggtgggcgtgtagtggtattattttattatggttttaatttgttttggtttgatgattaatgcggttgagtatatttttatgattggttttttatatattttttttttgtgaaatgtttttttaaatttgttgtttattttaaaattgggttgtttgatttttttttttggatattgattttttgttagatacgtgttttataaatattttattttagtttgtggtttgtttgtttattttttttttttttttaagaataaggtttcgttgtattgtttaagtaggtttgaaatttttgggtttaagttgtttttttgtttttgtttttttaagagtcggttttataggtatgagttattatgttcggtttgtttatttttttagtggtattttttaataagtaaaagtgtgttattttaatttttatgaagtttaatttaataaatttttttttttgtggttttttttttgtgttttttgtaagaaatttttgtttattttgttaaattgtaaagatatttatgtttttttttagaaggtttagagttatatagtttttatgaattaatttttgtatatggtgtgaggtagagggttagggtttattttgttgtcgttttatgtgtttatttagttgttttaaattttatttttttttaaagtttttattttgtatttttttggtgatttatgaggtcgtataattttttaagatttttgttggttatttacgtatttttttttgtaaaattatttgtttacgttttatttttttttaaaattatgttgttttaagatcgagtgatttttgaagtttttattttataatgtttgaaagaatgaatattttgttttttagttataggtttttgttttttgttttgtagttgtatagtggggtaagatttgggttttgttttgttgttgttttgttgtttttttatttgattgtttttttatgggttttatttaaaaaaaaaattggtcgggtatagtggtttacgtttgtaattttagtattttgggaggtcgaggcgggtagattacgaggttaggagattaagattattttggttaatacggtgaaattttatttttattaaaaatataaaaaattagtcgggcgtggtggcgggcgtttgtagttttagataatcgggaggtcgaggtaggaaaatggtgtgaatttgggaggcggagtttgtagtgagtcgagattgtattattgtattttagtttaggtgatagagtaagattttgttttaaaaaaaaaaaaaaaaaaaaatgttgttttatatgttttttatatattttggatataagttttttattagatatatgtattataagtttttttttttatattgtttttttttttttggtttttttaatgatgttatttaatgagtaagagtattttgtttttataaagtttaatttattaattttttttagtttcgatttatgatttttgtgatttatggaggaaatttttgtttatattaaggttaaaagaagtttttttattttttagaaattttatagttgtatattttatgattttttttattttttaattttttaaatttttatattttttaatttattatagtcgttaggatgttgtatgatttattttaaattagtttttgtatttggtttgaggttagggttaatttttgtttttttatatttatatttagttttagtatcgtttgttgaaaagatatattttattttattgaattatttgatatttttgttaaaaattattgattgtatatgtggttttatattagtatatgtacgtatatatatgtaggttttgtgttgattgtatgtgtggttttatattagtatatgtacgtatatatatattggttttatgttgattgtatatgtggttttgtattagtatatatatattagttttatattgattgtatatgtggttttgtattagtatatgtatatatatatatgtaggttttatgttgattgtatatgtggttttatattagtatatgtatatttatatatgtaggttttgtgttgattgtatatgtggttttgtattagtatatgtatatatatatatataggtttcgtgttgattgtatatgtggttttgtattagtatatgtatatatatatatgtaggttttatgttgattgtatatgtggttttgtattagtatatgtatatatatatatataggtttcgtgttgattgtatatgtggttttgtattagtatatgtatatatatatatgtaggttttatgttgattgtatatgtggttttgtattagtatatgtatatatatatatgtaggttttatgttgattgtatatgtagttttatattagtatatgtatatatatatatgtaggttttatgttgattgtatatgtagttttatattagtatatgtatatatatatatgtaggttttatgttgattgtatatgtggttttgtattagtatatgtatatatatatatgtaggttttatgttgattgtatatgtggttttgtattagtatatgtatatatatatatgtaggttttatgttgattgtatatgtggttttgtattagtatatgtatatatatatatgtaggttttatgttgattgtatatgtggttttgtattagtatatgtatatatatatatgtaggttttatgttgattgtatatatatatgtggttttgtattagtatatgtatatatatatatgtaggtttcgtgttgattgtatatgtggttttgtattagtatatgtatatatatatatgtaggttttatgttgattgtatatgtggttttatattagtatatgtattgtatatatgtaggttttatgttgattgtatatgtggttttatattagtatatgtattgtatatatgtaggttttgtgttgagatattattgtgtttttttgatattttgtttatttttttgttgatgttatattttgattaatgtggttttatagtaagttttaatataaagttttttaaatatttaaaatattattttgaatattttaggttttttgagtttttttataaatttaagaagtagtttgttgatgtttataaaaatgtagtgtgaattttggttgagattgtgttgaatttgtagattaattaaggaagaattggtattttaataatattgagttttttgtatagatggtatattttcgttttaaaggtttttttgtattttttttatttttttattgaaaaaaaatttttatagaattatattgttttgtagtttttaagaaaaagattttgtatgttatttgttaaatttatttttaagaattttatttttggtattattttaagttgaaatagattttaaattttatttttaattatttgttgttagtatgtaaaaatataatagatttttgtatgtaaattttatattttatgattttttttaaagttatttattattttggtaatggttttgtaggttttttaggatttaaatatatagttttatttttttttgattttgatgttttgttttttttttttgttttattgtattggttagagttgttagtttagtattgaatagtagtgattagtggatatttttgtttgtgttaaatttataatgttaattttagatttgttatatatgatttttgttagattgaggaaatttttttttatttttaatttgttgaaattttttaatatgaatgggtatgattttagtaaatgttttttttgtatttatggaaatgattattgttttgttttttattcgtttaataggataaattataatgattgatttttgtttttcgttttttttttttttttttttaaagaaatagagttttatttttgtttaggttgtagtatagtggtgttatcgtagtttattgtagtttgaatttttggatttaagtaatttttttattttagttttttaagtagtagggattataggtatatgttattatgttaagttaatttttaatttttaaaattttttgtatagatggggttttattgtgttgtttaggttggtttgtaatttttgagtttaagtaatatttttatttttgttttttaaagtgttgagattataggtgtgagttattgtgtaggtttgattttttaatattgaattaattttgtatttttggaagaagtttaatttgtttatgagatattattttttttatatattgttaaatttgatttgtttagtttttaaggatttttgcgtgttgatttatgagggatattggtgtggtattttttttgtttgttagtttgtttcggtaatgtttttgttagttttattttggttttataaaattagtttggaagtgtttttttttttttgttttttgtgtttttataaggttgatgttgttttttttttaaatgtttgatagaatttattaagaaaatcgtttggatttagaattttttattaggaaaggtgattgtttgtttttaattataaatttaatttaatgtatagaaagagttatttaggtttttttatttttttttgttttatttttggtaagttgtattttgaaggaatttgttttttttaggtaagttgttgaatttatttatttaaagttgttcgtaatataagtatatttagggtttgtttttagatttcggtaataaagtaaatattgtaataaagtacgttatataaattttttggttttttagtatatataaaagttatgtttaggttaggtatggtggtttatgtttgtaattttagttttttgggaggttaaggtgggcggattatttgaggttaggagtttgagaatagtttggttaatatggtgaaattttatttttattagaaatataaaaattagttgggtgtggtggtatatgtttgtagttttagttgtttgggaggttgaggtgggagaattgttcgaatttgggaggtggaggttgcggtgagttgagattatattattgtattttagattgggtgatagggcgagattttattttaaaaaaaaaagaaaaaagttatgtttatattatattatagtttattaaagtgtataagattattatgtttttttgttaaaaaatgttaataattatttgagtttttagtaagttataattttttttttggtagaaggtttgttttaatgttgatggttgttgattaggtggtggttgttgaaagttgaaggtagttgtggtagtagtttttttgttttttttttttttttttttttttttgagatagagttttgttttattgtttaggttggagtgtagtggtacgattttagtttattgtaatttttgtttttcgggtttaagtaatttttttgttttagtttttcgagtagttgggattataggtgtttgttattacgtttggttaatttttgtatttttagtagagatagggttttattttgttggttaggttggttttaaatttttgattttaggtgatttatttgttttggttttttaaagtgttgggattataggcgtgagttattgtatttggtcggtagttttttaattgaagtttttgatatgggttgatttttttttttatgaaagatttttttgtggtacgtattatgtttgatagtattttatttataatagagttttttttaaaattagagttaatttttttaattttggttacggattgattaaataagttgatgtaatattttaaattttttgttgttattttaataatgtttatagtattttcgtttggagtagattttatttttaggaattattttgtttgtttatttataagaagtaattttttatttgtttaagtttgattatgggattgtagtaatttagttttatttttaggttttatttttaattttagttttttgttatttttattatatttgtagtgattttttttgttgaagttttaaatcgtttatttatgagggttggaattaattttttttaaatttttgttaatgttgatattttaatttttttttgtgaattataagtgtttttaatggtatttagaatggggaattttttttagaaggtttttaatttattttgtttagatttattagaggaattattaattatggtagatattgttttataaaatatattttttaaataataagatttgaaaattaaatttattttttttttatgggttgtagaatgggtgttatattagtaggtatgaaaataatatttatttttatatatattttcgttagagtttttgggttataaggtgtattgttaatgagtaataatattttgaaaggattttttttttttgagtagtaggttttaatgatttttttttttttttgatggagtttcgttgtgttatttagaatggaatgcggtggtatgatttcggtttattgtaatttttgtttttcgggtttaagtgatttttgtgttttagttttttgagtagttgggattataggtatatattattatgtttggttagtttttgtattttttgtagaaatagggttttattatgttggttaggttggtttcgaatttttgattttaggtgatttatttgttttagttttttaaagtattgggattataggtatgagttattgtatcgggttttatttgttttttttttgttgttgttttttaattgagatagagtttcgttttgttgtttagattggagtgtagtagcgttattttagtttatcgtagttttcgttttttaggtttaagtgatttttttgttttagttttttgagtagttgggattgtaggtgtgtattattatgtttggttaatttttgtatttttaatagagatgaggttttattattatgttggttaggttggttttgaatttttgaatttaggtgatttgtttgttttggttttttaaaatgttgggattatagttgtgagttatcgtgtttggtttttttttgtttttttgtttttttttaaattgagatagagtttttttttgttgtttaggttggagtatagtggtacgatttcggtttattgtaattttcgttttttgggtttaagcggtttttttgttttagttttttaagtagttggaattataggcgtgtgatattatgtttgaataatttttgtatttttagtagagatgcggttttattatgttggttaggttggtttcgaatttttgattttaagtgattttttcgttttagtttttaaaagtgttgggattataggcgtgagttgtcgtattaggttttaatgggtttttaatatttagtaaattatgttgtaaatagatgtgttgttaagtagggtttgttattttatttttgaagtatagatagaatagatttggtagaatttttaagggttttaggatttttggaacggttaatgagtattggttttaatttacggttaatagttgcgttagttttttatgagagttagtttgttttttgaagttttaaagataggtattgattttttttttttagttatgaaaattttagatgatatttttttttagtagaaggtgggatatttatgttgaaattttgttgtttagtgtagttatttttattagtgttttgagttagattttttgggtaatttgttgtcgtttttttattagtatttgttgttttattttgtatttttatattatagagatggtttttttttttaaattttatgatttgatttttgttagttttaaattttttttttttagtttttttattttttttagtttttatattattgaagagagttagggttttgttttggattaggtttttgtttaagggaatgttgtggttgatttgattttttatttagattatttaaattttttttatattagtattaaggttgttttgttttttttttttttatgtgtgtattggaatcgtatttttaattttttttaataatttttttttggtatttataatttggttagttatttggtataagagattttatttttgtttgttttggttttcgatacgttttttttatttagtttaattatttttagtttttgatttaaagtgagagacgggtgatttttttttttatttgaatatttagaggttattgtagggttattaattggtttaattttaatattgttgagttttagggaatagggatgtttgagtagagggagagagagcggggaatagttagttagtggagtagttagaatatataacgtttattgaataagtttattgttttatttggatgtggttcgttatgttttaaaaataattgtaataatggtattgaagattattgattattgggcgcggtggtttatgtttgtaattttagtattttgggaggtcgaggtaggtggattatttgaggttaggagtttgagattagtttggttaatatggtgaaatttcgtttttattaaaaatattaaaattagttaggcgtggtggcgggtgtttgtagttttagttattggggaagttggggtagaagagtcgtttgaatttgggaggtggaggttgtagtgagtcgagattatattattgtattttattgtattttagtttgggtaatagagcgagattttattttaaaaaaaaaaaaaaagggtcgggcgtagtggtttacgtttgtaattttagtattttgggaggtcgaggcgggtagattatgaggttaggggattgagattattttggttaatacgatgaaatttcgtttttattaaagatacgaaaaaaatagtcgggcgtggtggtgggtgtttgtagttttagttattcgggaggttgaggtaggagaatggcgtgaattcgggaggcggagtttgtagtgagtcgagatcgcgtcgttgtattttagatagagtaagattttgttttaaaaaaaaaaaaataaagaaagaaaaaagaaaaaagagattatagattattatagtagatataataataatgaaaaagtttgaattattttaagaattattaaatttttatatagagatatagtgttaatatgttgttggaaaaatggtgttagtagatttatttgatgtagggttgttacgaatttttaatttgtaaaaagtgtagtatttgtgaagtataatgaaatgaggtgtgtttgtgttttttgttattgtaatgtcggtaggattcgtaaggaaaatattttattttttttattgtgattttatgttcgttattttttttttattagtagtttggttaggaggttattaatttagatttttttaaagaattagtattggattttttttttttggtgtttatttttttgagtttttttgttatttttattatttttttttttgtatttgttttagcgtattagttagggtttagttaggaaataaaaattatatcggtaatttgaatagtaatttgtaatataaagtgtttttaattgtaagaggtagttaattattaaagggattataaaggggtgatattgtgatataagaaagatgtatttgggttgggttcggtgtagtggtttatgtttgtaattttagtattttgggaggttgaggtaggcggattttttgagtttaggagtttgagattagtttgggtaatatggtgaaattttatgtttattaaaaatataaaaaattattttggcgtggcggtgtgtgtttgcggttttagttatttgggaggttgaggtgagaggatagtttgagttcgggaaggtagacgttgtggtgagtcgagattgtattattgtattttagtttggatgatagagggagattttgttttaaaaattaatgtatttgtttgtttgtttgtttatttatttatttatttatttatttatttatttatttagtttttgttttttaattttgtttggtatgtagtttttaaaatttttgaaatttttaaagtgatgggtgtttttttgtttgttaaggaggcgattggtggttggaggtttttggatagtttggggataagggttggttgttaggggatttagttttgtgattagaaggttagaatttgtagttttttttatttattttttgcgaggtaagaggggatgaaggttgagttgattattaatggttaaagattttatgttatgtttatgtagtgaagtttttttgaaaatttaaaaggatgaggtttgtagagttttaggttgttgaatatttgtaggtgttgggagggtagtgtattttttcgtggaagttttatgtcgttttttttatattttttttatgtattttttttagttggttgtttatttgtattttttgaaatattatttgtaataagttagtaattttaagtaaattgattttttgggttttgtgagttatttaagtaaattattgaatttgagaagggagttgtgaagattttaaatttgtagttaagttagatagaagttatgggtaatttggtgttttattatttgcgattgatttttgaagttgagggtagttttgtgagatggaatttttaatttatgggatttgtattaattttggttggtgttagaattgaattgaattgtaggatatttagttggggattgttgagtattggagaattgtttgggggtcggcgggaggaaattatatatttggtgttagagttgaagtattgagtgttgtgaatgagagtggagagatagagtttgttttgttttatgtaagaggattttaaggagtatagaaagagtaaatatgagaagtagttattttagaagaaaatataggaggaaagtttcgtgatattggagttggtaatgtttttttggatgtgatatcgaaaatataataaaagaaataaatgataaattggattttattaaaatttaaaatttttgtgtattaaggaatattattaatggcgtgaaaaggaaatttatagaatggaagaaagtatttgaaaatcgtatattcgataaaggattagtatttagaatatataaagaatttttataattaagttataaaataaaaaaaaataatttagtgaatagatatttttttatagaagatatattaatggttaagaagtataggaagagatgcgtagtgttattaattattagggaaatgaaaattaaagttataataaaatatgattttatattttttaaggtggttgttagttaaaatatggataatagtaagtgttggtaaggatatggagaaattggagtttcgtgtattgttggtgggaatgtaaaatggtgtagttgttgtggaaaagatataataattgtttaaaaaattaaatttagaatgattataatatttagtgattttatttttagatgtatattttaaagaattgatagtagggatttgaataggtgtgttatatttttgtttgtagtagtattttttttataattaaaagatgtaggtaatttaggtgtttattagcggatgaatgaatagataaaatgtggtttatttgtatagtggaatattattttgttttaaaaaggaaggagaggttaggtgtggtggtttacgtttgtaattttagcgttttggaaggtcgaggtgggtagattatttgaggttaggagtttgagattagtttggttagtatggcgaaattttgtttttgttaaaaatataaaaattagttaggtatgggggtatgtgtttgtaattttagttattagggaggttgaggtaggagaatcgtttgaattagggaggtggaggttgtagtgagtcgagattatgttattgtattttagtttgggcgatagagtaagattgttttaaaaaaaaaaaaaaaaaaaaaaaaaaaggagattttgatatatgttatagtatagatgagttttgaagatatgttaagtgatagaagttagatatgaaaagataaatattgtatgattttatttttatgaggtttttagagtagttaaatttagagagatagaaagtgggatggaggttgttagaggttgggggaagggagaatgaatgggaagttggtgtttaatggggatagaattgtagtttgggaagatgagatggatggtggtgatggttatataatagtgtgaatgtgttttatgttattaaattgtatatttgaaaatggttaaaatggtaaattttttgtgatggatattttaaggtatgtatgtaaatatatagaagtagttattattattggggttgatggaaaagaaattaagaattcggagcgttttttatattttgttacgttttacgtttaggttttgttggagagtgtgtgattgttatagaaatttgtagtttattggtaataaaaaggtttttgttagaaggtgtagaaagagtggatttgtaggattagtttattgggtagtcgagaaatttattagagggtatgggtgggtaggagttgggtgtttgagaagtttgttgaggttttattgggttagagttggggtgttggagaaatttagtatagagtaggttttattgggtatacgttattggtagttgtgtttttagaggaaaaagagattttggaattaggaagagaagttgttattttagtaaggtttggtagttttttatagtgttgttttttgtggatagagtttgatatgattgtatttggttaaggagaaagatttataaggtttcggtttagtattacggagcggggtttggtaggatgtatgtagagttaagaggtaatatatgggtaattggtatatttttttagattttttgttttttttgttgttttgttttgttttgttttgttttgttttgttttgagagagtattttgttttgttgtttaggttggagtgtagtggtatgatttaggtttattgtaatttttatttttcgggtttaagttatttttttgttttagttttttaagtagttggagatgtttattatgtttagttaatttttgtatttttagtagagatagggttttattatgttggttaggttggttttgaatttttgattttaggtgatttatttgttttggttttttaaagtgttgggattataggcgtgagttatattgtatttggtttatttttttagatttttaaagtagatttttaggtttttttttttttttttttttttttttttttattttttttttaatataagtatttatagtttttttttaagtattagttttagtttacgtattttagtatgttgtgtttttattattattttatttgaaatattgtaaaattttttttgtgattttttttttgatttatgggttatttagaagtatgttgtttaatttgtaaatagttaaggtttttttgagtattttagagttattgatttttaatttaattttattttggttagataagtatattttgtatgtttttaaaatttgagatttatggtttagaatgtgtattttggtgaatgtattgtttttatttgagaaaaaaatatgtatatatattttagattttttgagtatagagttttataattgttgattaggttaattgttagttattagtgttttttagattatttgatgtttgttttttagatgttgagagaatggtgtttgttatggtttatttgtttgtgttttttaaaatttatatgttggagtttaatttttggtgtagtggtgttgggaattggggtattagggaagtattggtttatgagggtagagttatcgtgaatgggattagttttttttgttatgtggggatatagtaggaaaaggatatttttgaagtagggagttagtttttattagatattgagtattttgattttggattttttagtttttagaattgtgagtattataatttgtttataaattatttagtttaaggtattttgttttaatattttgaatgaattgaggtggtgttaaaatttttaattatgtatttaggcgtagtggtttatatttgtaattttagtattttaggaggttaaggcgggtggattatttgaggttaggagtttgagattagtttggataatatggtgaaattttgtttttattaaaaatataaaaattagttgggcgtggtggtaggtttttgtaattttagttattcgggaggttgaggtaggagaatcgtttgaatttaggaggtggaggttgtagtgagtcgagattgtattattgtattttagtttgggtaataagagtgaaatttcgttttaaaaaaaaaaaaaaagagtttttatttatgattgtggaattgtttatttttttttttaatttttttaggttttatattatgtattttgaagtttttttggttaggtgtatatatatttatgattataatggtgtttcgatgaattgattatttaattatgatgaatgtatttttttatttcgtaataattttattttggatttaattttattgatatttatgtagtttttttagtttttttaaatatgttgtttgggatgtataagaaggttggagaggtttatggagaaatttatgatggtttgatttatagttttttaattttattatggtgcgaacgtggtatgtatatagtagaaattgtattttaagtatgtgtgaaattattgtgttttttatttttagtatagtatttaataatttatatgagatagttaatattttattataaaataggttttgtgtttgttgattttgtttaattgtaggttgaagtaagtgttttaattatgttaaggtaggttaggttaagttagaatgttcggtaagttagatgtattaagtgtatttttgagatgatatttattttttatttatgatgggtttgttaagatataattttattattatttaagtagtattagtatgtttttttttaaatagaaaattttaatttgtgtttatattgaaatagtattttttgtagatagtatatagttgagttttgttattttatttattttgatagttttcgttttttaattggaatatttaggttatttttgtttaatatagttatagatatgattgggtttagagttattattttgttttttgatatttattttttttattttgtttttttggttttttttatgttaattaagtattttttagaattttattttaatttatgttttttttttttttttttttttaagatagagttttattttgttgtttaggttggagtgtaatagtatgattttggtttattgtaatttttgttttttgggtttaagtgatttttttgttttagtttttttagtatattgggattatagacgtttgttattacggtcggttaatttttgtatttttagtaaagacggggttttattatgttggttaggttggtttcgaatttttgattttaggcgattcgtttattttggttttttaaagtgttgggattataagcgtgagttattgagttcggtttgttttgattttttaattgtatttttttgtattgttattttagtagttattttatagattttattgtatatttttagttttttatagtttatttagaattaatattgtttttttttatggaaaaaaagtgtaagaattaggtaattttatgggtttatttattattttttattttgtatgtgatggttgttagatatttattatatttatatatattgtaaattagataatataataaggaaatttttgttttaaatagttttatgtattttaaagaaattaaaagtaaaatagaattttttttatttgtttatgtatttgttatattttgtgttttttatttttttttgaagagttgagtttttatttggttttattttttatgattttggagaatttgttttacggtttttgtagtgtaggtttgtagatagttaatttttttttatttttatttatttgtaaatttttattttgttgttattttttttttttttatttttatttttatttttgagatagagttttattttgtttttttataggttatagtgtaatggtgtgattttaaaatttttgtttaattttaatttattaatttttttttttcgggtttaaacgatttttttgttttagttttttaagtagttgggattataggtatgtgttattatatttagttaatttttgtatttttagtagagatgggattttattatgatggttaggttggtttcgaatttttgattttaagtgatttgtttgttttggttttttaaaatgttgggattataggtgtgagttattgtgtttagtttgttgttatttttgaattataattttattggttatagaattttgagttgttagtttttttttttaggattttaaaatatagggttttagtgtttttggttttcgttgtttttgttaaggaattagtatttatttagttatttttttgtagattatatgttgtttttttttggatgtttttaagattttttatttaagtttgattgtttagtatttatttttgggtaaaaaagtttttagaaattagaaatttatttagttttatttttttttgttaggtgtagattttattttagtttttatttatttgagatattttatattgattttaggttgttgttattttgtttttttaaatattttgtttagagttataatgttttttgtagaattgattagatagtagttattttttgtgattaggagttttgattttttagatttgttgatgggtttataaagtttttgttcgtggtttttagttggtagtggtttttttgttttgaagttgttatgagtgtgtaaaatttataggtttaattttttttattagtatagtttagaaaagtggaatttttggtttgggtggttatggtgttttagattattggttagattagggtggtgattgttagttggtcgaatgtggggtttttagtttagtatttttggattttattttaggagttatggttgttttagggttaggggtttggttttagtttttgtttttttttttttttttttaagttgtttagtattaggttttaattagtattttttgtagatagggtgggtcggttttttattagaggggtagggttgggcgggaagtttgttgagtttttttttttgtgtagtttatagttttggggttagttttagaggggtgtagaaaggagtttttaaaggtagaaatttatttttttttttgtttttgtgtttttagggataaaggagaggtggttttagttggggggttattagtggtatgtaggaggtttatatgattattgtttgttggggtttttttttttttgtgagagagacgagagagaggagagagagtgtgagttagggtagtgtttttttttagtaacgtagatttttgtacgtgttttttaggagaaatttcgttattcgttagagttttagatttggaagaagttttgtttttttttttttttttagtgtagtgtgtgtgtgtgtgtgtgtgtgtgtgtttttatatgtattatatttttttatagaggaaataattttcgtttaagtgtaaaggttgggattggagtaggtagtatgtgggttaaaggagtagagaggaggaaacgggggcgggggtgagggtgggaataggaggtgggtagatgttacgaggtatgttttttataattagaagggttggtggagatgattagaatgttttagatagattttttattaaatttttaaaatttaattttgttttatgaagtttgaggattttgtagagtgaaagataaggaagggtttttttgtaggggggtgtgtgtgtttgtgtgtgtttgtgtgttgtgtgtttttatgtgtgtgtacgtgtggatttgtgtggtgtgtgtttgtatatgtgtgtacgtgtggatttgtgtggtgtgtgttgagtgtgtatatgtgtgtgtttgtgtgttgtgtatgtatttgtatatgtgtatatagattttattttttttttttttggtttattaagtgttagaaagaattttcgtgagtttttttattttttttaaggttgtatatggagggatttgcgtaggtatatgtgcgcgtgtatataatatatatatatatatatatatatatatatatatatatatacgagttaggggcgagtatttttgtggattgtatttaggtttggtaggaaatcgggttttgggaaattgtaggttttatttttggtagaaaattatgtttttgttgttgttcgttgaagggaatattaagtggggttggggatagtttatgttgagaagagtaaattttgtttatggtattggggatattgagtggtttttgtttcgggttttggagggtttgggagatacgtttgtagttttgggtattttttaaggttacgggcggttatatttaaggttaggtttttttttgtgtgagttgcggttagtaggaaggttgattttagaggcggttttagggtttttggaggttttgtttttgagatatgggttaaggttagagagtcgagaaggttgttgttgaggattttggttggcgtttagtttagcggttttttaggcgggttttgtgtaggggttgatgaagttagttgggaaatttgtgaaataaagtataggttttttaggtttgtttagagtttcggtattagatgaggtgtagagaagggaattgagttgttaagtgtgaataggagagaggagttttaggattatataggggtttcgatatggtaggtgtttggttagtagcggtgttgtttttattgttggacgtgggaaaatgtattgatatttgttgattagagtcggggtgagtatttgggtgattttgtagatgagataaaataagggttgtcgtgggggaggggtttttgtcgggttattttgttgaggttttgtgttattgttttgcggttgttataataaaggattataaatgaggtgatttaaaatattcgaaatcggttacgtgcggtggtttatgtttgtaattttagtattttgggaggtcgaggcggttggattacgaggttaggagatcgagattattttggttaatatggtgaaatttcgtttttattaaaaatataaaaaaaaaaaaaaaattagtcgggcgtggtggtgggtgtttgtagttttagttgtttaggaggttgaggtaggagaatggtatgaattttggaggtggaggttgtagtgagtcgagatcgcgttattgtattttagtttgggtgatagagtaagatttcgttttaaaaataaaaataaaaataaaaataaaaatattcgaaatgttttttttaaagtttttggagttagaaattttagatcgaggtgtttgaaggtttattttttttgggggtttcgagggagattgttttatgttttttttcgagttttgcggcggttagtaatttttggtatttttcggtttgtagttcggtttattttttatttggtttttattttgtgtttttttttgtgtttttgtttaaattgttttttttgttgtttttttaatttatttttagggataggtttttattttgttttttaggttggagtgtagtggcgtgattatggtttattgtagttttagttttttaggtttaagtaatttttttattttagttttttaagtagttgggatataggcgtacgttattatgtttggttaattttttaatttttttgtagagacgagggtttaggttggttttaaatttttgcgtttaggtaatgagattttgttttttaaaatattgggattagagatatgagttgttgtgtttagtttatttttgttttataaagatatttgttattggatttagggtttattttgatttaatatgtttttaaataatttaattatatttttaaagattttatgtttatataaagttatatttataggtattggggggttaggatttgtatatgttttttgggggaatataatttaatttataatgggttttatttatagaacgaacggtttttttagggtgtgcgtaggtgggtgaggggtttaggagagggatttgcgtggtaagagggtttgtgtttacgttagagattttagaaggagattggatggggtggttgtatggagtaaggggttatagttattgtttttaagtagttggtgggttgtttggtagaaagggagtatttattttgagtttttttaagatatgaagttagtattaggtatttggaaggtgttagcgagtagagtttgattttttatagaaagaggtgttttttttataatgtttatttgaggacggtggaataggttattttataaggtagtgagttttttatgtttggaagtatttaagtaggggttatgtgggagttgtttaggagtgtatagaagggattttagaggtttttgttaatattatttttgtttgttttattttacgataatttgaattttagaatgtaatgttattggggatatgtttattagaggggtttttagtattaggttttatatattatgtattatttttagggtagggaatgagagtaggttttattttttttggttgtttgtgaggattaggaggtttgttgttgaggtagttttttgtggaaatagtgttttagtttcgtaatttatttatcggagttttaatattttaatgaaatattgtgttagatgggttttgggtatgtgtgtgtagattgttataagtttatgagaatgtatatacgtatattgtatgtgtgtgtatatatgtatgtatatatgtataagaatacgaagattcgaggtaggtatagttcgtgagatagatttttttaggttgaaagattttttataagggtttttagaataaggttttagtttcggtagttttttttatttttggtgggaggatttttatagagaagaagggttaagaagtatagtttttgatgtttacggtgtattaagttttgttttaagtttgtgttttattttttatttatttagtaaatttgtcgtttttgttttgtgttagatgttgtttttagtattttataaatattgatgtatgtttgttttatgataattttgtgaagtaggtagtgttatttcgttttatagatgaggaaataggcgtagagggataaagggatttgtttaaggtttgtttttattttatacgtatatgaacgtttatttatgcggtaggcgttagtttttttttgatgtgagttaggttttgagttggttggggtttgggttttattttggttgtgttttgttgtgggtattaaggaagtttttagtagttttatttttttggtatgatttagttttagggattggatttttttaaatgtttttgtttagtttggagttttttttttagttgggggagggttgaacgattttttatttttggaggttgtcggagttttttttgtttgtatgcggtcgttgtcgggtggataggtttgtttgtgggttgaggtttttagtagttggggtggattatttttttttttaagaagttttgggagaagtagttgagggggttagcgtttttttgaggttaattttttgttttttttagcgtaggcgcgaagttatttttgtttgtgtgtttgttatagatagtggagggcggtgtaatcgtgacgtttgtttgttgtattttgcgtttttgaggacgttgatttttggtcggtgttgggcgtttgttttttagttattttgttttgatttggcgtggtaggttcgagtattgtttttttataaggaaataggtttagaggttttgagttatttgttcgggtttttttagttaataattggttgagttaggatttttatttagttttgtgattttagaagtttaagttttttttattacgttagggttaggaaaggattagaatgtttttttacgtgtcgattatttggatgatttgtgtagtttagttcgttgtagttgtttaataaaaatgtggaatgaatgggtttatatgttttattgtgtgatttagagttaatgattttggttgatttttttgtttttatttcgtggtttagtatttttttttggggtgtgtgattttggaagtagtgattttttttattttattttgaatggtgtttgcgtcgtagtaggggagtagttggggattgttagcgtttgttgttggtgggttgtgcgttagatttcgttttggatgtgtgggtgattgttagttatatgtgtgtgaagggttgtgcgtgtaggatttgtgtaaatgtgtttttttttgttgttagtttatgggaggttgttaagattttgtttttgtatattagtttatattttttttgtggtttattgttgtggttgtttttttgtgttacgtggttgtaggtatagtttttaagtggatggggatcgtgggttgaatgtgtattagatgtttttgttttttggtgggtggagatttttaatttatgtatcgtggttgtcgtatttgaaaggttttttatggtgaaggatttggatttgagtaatttttcgtagaggttttagaagtgttttttggtcgggcgcggtggtttatatttgtaattttagtattttgggaggtcgaggtgggcggattataaggttaggagatcgagattattttggttaatacggtgaaatttcgtttttattaaaaatataaaaaattagtcgggcgtggtggcgggtgtttgtagttttagttattcgggaggttgaggtaggagaatggcgtgaatttaggaggcggagtttgtagtgagtcgagatcgcgttattgtattttagtttgggcgatagagcgagatttcgttttaaaaaaaaaaaaaaaatgaagtgtttttagtttttttttttgtggtgaggttttgagtttttatttttagaagaaaatttggttggggagggtatttttagattcggatataaacgttaggagattagggttgtttttttaggtgattaattatagagatttagggaaagttacgtttggaagaggcgatattgtgttttagttttatttatttttttattttatagatattgtttggtgtttagttcgtatcgcgaggttttttaagtagttttgggtatcgtgtatttggtatggtttttagttttatttttttgttttgggagattcggtggggatttcgggttgagtttttgtggttgtggaattttggtggtttattgtggtggttgagaatagggacgtggggttggacgggttgagtgtaatttttagtggtttcgtgaattgtttgggagttttgggtagtttttttttattttgtgttttcgttttttgatggaaaaatgggggttaggggggagcgattttgaaggtattcgtgggaattaagcgaggtgataaatgtagtgtttttggtagagaattggatatagagtttatttttatgaagggggttgttttttttttttttatgtttttttttgtttttatttttttttttgtattttttttttttgtttttttttttttttttttttttttttatatgtaggtatattttatttggtgttttaattgtttttttttattgtttttttgtaagtggttttttaagtgggaatttaggtttggaaagggtgggtattttgtttggtgggttttggtaggttaggcgttgagtagttttaggagatataattttaggaaaaggtttatgtaggttggttgttatgacggattgttggtgggagaggggaaggcgtcgtggtaggggaagttttggaaatatttattagtggttttatttatgatttaggatatttgttaggttattagaatatagttgaggaagttgtcggttagacgtttagaagtattaatttggtggttgggttgtggggggatttttttggataggtagataaggtgtcggaggaaggggttgatatttatttagtgtttgttatgtattgagggtataaagggtaggatggagagttggtttacgttatttgtggaattttttaggtgtgggggtagatggggaagtaagggggtttgaagatatatgcgtttattaaatgtttttaaattttaagaagaagaataaggatatatttataggggtagggttgaaagtttgatgtatggtgttttggggtttgtttttgttgtaatagttatagtggtttttttttattttttttttttttttattttgttgtgaaaatgtttaaaatatatggttaagttgaaagtattttatagggaatatatttagttattatttagattttattattaatattaagttatatttgttttattattttatcgtttatttatttttttttcgtttggttatgaatttattttatttttattttttggtgtattttaaagtaattttaggttattttgattatttttggaattattgttagaaatttttttttttttttttttttttttttttttttttttttttgagatgggattttgttaggttatttaggttgaagtgcggtggtgtagttatagtatattgtagtttttaattttcgagtttaagtaatttttttgttttagttttttgagtagttgggatcgtaggtatttattattatatttagttttatttttaaaattttttattaattttttattttttgtatttatttaggattattttttataaagttagggtgttgtaggaggggttagaattttaagttttaattttggttttgttattaatattgtgcgatttttagtaaattattttgtttgtttaggttttgtttttatttttatgaaacgagggcgttaaattgtatgttataaataatgagggttattagttattaagtttttattttaggttaggtattttttatatgttattatgagtttttttaatttaggtattgtttttaatggatagtttagttaacggaagtttagagaggtggtgtaatttgttaaaagttttattatttagtgaatgtttttacggggtttgtatttaggagtttgatatagagtttaggttttagtatttggcgatgttttgggggtgtgagtagtttagtttattttgggtacgtgtttatttgttgttttttttgttttatgtttgtgtttgttttttttgaagtttagattgttattttttagttttaaatattaaaattggttaggtacggtggtttatgtttgtaattttagtattttgggagattaaggcgggtggattatttgaagttaggagtttaagattagtttggttaatatggtaaaattttatttttataaaaaatataaaaattagttagatatggtggcgtgtatttgtagttttagttatttaaggagaatttagttatttagttattgaggtacgagaattatttaaatttgggaggtggaggttgtagtgagtcgagatcgtattatttttttttaggttaggtaataagtgtgagattttgttttaaaaataataaataaataaaataaaataaaaattaaaattaaatgttaaaattaatttataaaataaattttggttaaagtagtttgtttattttgttttaattatgtatattgtattagattttgttaggggtttagcgtataaagatgagatttttgttttgttagataggtgggatgatggttatattttgagttagttaaggtattatttggttgtgtaataaaagttaaaatattagaggttgagtagtattcggatttacgttttagtttaagtgttagtcgttatgggggtttaggatagttcggatttagtttatttttttggtgtattttcgatatatagtttttattttttgagttgagatggttttagtttttgtcgttatgtttgtattttagttagagggaagggaagaagggagaggggaaagggtaagtgtttttttttatttttaagggtatgatttgaaagttaaatattttagtttttttttattggttagaatttagttgtatggtcgtttttgttattagggaggttgagtaatgtattttttagttgggtttttttgtgtataattaaaattttagttattatagaaaaaagggagtttagatattggggaaataattagtatttgtattatatgtattgatagttttttttgtatgaatagagttgtggtaggttttatgttagggagaaagtaagattggaaaagagtttattaaggaggtggtatttgtattgtgtttaaggggtaagaaaaacgttttttaattaggagttataaatgtttggttgaagtgttattgtttttttattttggagttggaatagacgttattagttaattatgatggttgttgggtgtattggttaatatttataattttagtattttgtgaggttgagggtgggaagattgtttggggttaggagtttgagattagtttgggtaaattgtaagattttgtttttgtaaaaaaatataaaatgtagttgagtgtggtggtatttgtagatttagttttagttattcgagaggttgagatgggaggatcgtttgggtttaggagttcgaggttgtagtgagttatgattgtattattgtattttagtttgggtgatagagtaggatttgtttttaaaaataataaaataaaattaaagttttaaaatggaaaaaaaattatgagtatataattttagatgtatttttaagatagtaaattcgggtgggcgtagtggtttatgtttgtaattttggtattttgggaggttaaggtgggtggattatttgaggttaggagtttgagattagtttggttaatagttttatttgtattataaatataaaattagttgggtatggtggtgggtatttgtgattttagttatttggaaggttgaggtaggagaattgtttgaatttaggaggcggaggttgtagtgagttaagattatattattgtattttagtttggagaaaaaaagtaaaattttgttttaaaaaaaaaaaaaaaaagtaaatttagggttaggtttgtagttatatggttatttttttttttgagtatggaggtagttttagaaatttgttttatattatattagtgggtagttgattgggttagtttgttagttgaattttatttgttatagttattttttatagtaaggggtattttagatatatttttttttttagggaagaataagtcgtagttgtttgagcgttttatttagtggtgtgtatgtttttttttaattttgtgtttagtgatgttttgtttgtagtttgaaatttgttatagtgggtgtgtttatattataggaattggtaaatattatatattaggttttattttttgttttttattagggtaggttgttttttttttgttgtttttgttttttgtttttttttttttttgagacggagtttcgttttgtcgtttaggttggcgtggagtgatgcgattttcgtttattgtaagtttcgtttttttggtttatattatttttttgtttgagtttttagaatagttgggattataggcgttcgttattatattcggttaattttttgtatttttagtagagacggggttttatcgtgttagttaggatggtttcgattttttgatttcgtaatttgtttttttcggttttttaaaatgttggtattatgttattgcgttcggtttagggtaggttgttagaaatgtattagtttgttagttttagttttgtttgttttttattttttttttttttttttttttttttgagacggggtttttttttgttgttttttaggttggagtgtagtggtgtgattttggtttattgtaatttttgttttttgggattaagtgatttttttgttttagttttttaagtagttgggattataggtgtttattattacgtttagttaaattttgtatttttagtagagatggggttttattatattggttaggttggtatcgaattttttatttaaggtgatttattcgttttggttttttaaagtgttgggattataggcgtgagttatcgtattgggtttttttcgtttttttttaatgaaaatttttttgaaagatttgtttattgatgtttgtgttaataggtattgtttgcgggatagagtttgttttttttttgaaggtttttttttgtttgggtgattatttgtatgttattttttgttgtttagaattaaagatgtagttatgtttggggtaggttgggaaaatttgtgggaattatagagtttgttgttatgttgtgttttggatatttgaagtttggtaggtaggtgggatcgagggtgggtattaggaaagtgatgtggttttataggaaggggatataggttttgagattttaggtttttaattggataaagttgttttttttttttggataaatgttttagtttatttataatcgagtggttagtttttttttttttttttttttttttttttttgagatggagtttcgttttttcgtttaggttggagtgtagtggcgttatttcggtttattgtaagtttcgttttttaggtttacgttattttttcgttttagttttcggagtagttgggattataggcgtttgttatcgcgttcggttaattttttgtatttttagtagagatagggttttatcgtgttagttaggatggtttcgattttttgatttcgtgattcgttcgtttcggttttttaaagtgttgggattataggcgtgagttatcgcgttcggttaagtggttagtttttttagttgtcgggttttgtatattttgttggttttggagattatatgtattatgtagattttatttgttttttatttttagtgttgggggaggggttaagggtttgtcgatgtgttgatatttggttatttattggttttgaatgtttatatttatttttttgaaatcgatgtttcgtatcggaggttttatgtggatttgggggtagaggtttgtattttagatggtggggtggtttttattaattaggtagattttttgttttgttttgttttttgggttttgtagttttagatgtgtgtttaagatttgtggttatatggatgggataagttatagagatttagatttcgtggtttttgtgattagagtagtcgtggttttgtttgggaatgtttttattttgttgttgaaggtgagaaatttttttgtgttggagaatagttgtgttgagaagttggtttatttggtttgtaggattgttggggtaagggaggtttgttgtcggttttttttttttttttttgattgggtgttttttgtttaggttttttgtagtaaaagaattttttaatttattttgtttttttattgagtttttattttatgaagtttattttttaattttagttgattggtttttatttttttaagaggaaggttaggggtagacgaggttgaaggaggttgatttttttgtgttttcgtagtttgagttgatgttgttgtatgtttatagggtttttttagtttttaaaaaggttttaatacgttcgttatacgtttgtggtttttttggatgttatattaatttagtaaggtttgagttagaggttgtttttgaggttgtgaaaatagaagaagggtttagaggagaatttttttatttgacgattttaggaaggttttttagaagaagtagtttttgagttgagatttgaagatagattaggtttgagttaggttagggagggtgtgaggggtttattaggtagagggaataggatagggtaggtatagaggtttggtatttggtttgtggggaagtgtgagtttttgggtatgattaaggcggggagaagtggcgtgagaggaggtagatgtggttggtaggagatcggcggtttcggttttgttgagttttattttgtatgtattaggtgatagaggttgtttaggacggtgggtagggaagtgataggttatatggttattttattaatagtcgggagtttagtttggggggatttaagattttggggaaggtacgagttaggggtttgttagagttaggagttagtgggagaaggaaatagtgttgtttatgaattataaatagatattttcgtaattttttttgacgtgatataattttaaagtgggttatttagaggtgggaaggtgatttttggttttttaggttttgggtttgttttttttttttttttttttttttttttgagatggagttttattttgttgtttaggttggagtgtagtggtgtaattttggtttattattatttttgttttttgcgtttaagtaatttttttgttttagttttttgagtagttgggattataggtatttgttattatattcggttaatttttgtatttttagtagagatggtgttttattatgttggttaggttggtttcgaatttttgattttaggtgattcgtttattttggttttttaaagtgttgggattataggtatgagttattgtgtttagtcgagtttatttttaagttttttttggtttttagtgtttttgtattagtttatttttttggttttttgtttttaagagttttttttaagattgtttttaagtggataggtttttagaattaaggagtagttttaggagtttttagttatagatattttagggggttcgtgtggtttttagtttttggtttggtttcggtagttttggttttttgtgttgttttttatatagtttggttagagttggttaggttttttggttgggtcgagttatcgtggttagtgatttatgtagggggagaaaagtgaggagggggaatagagtgcgagggggattgtgttaataataaatttattaggtttttgaggttattttataggagggataaatggtttatttaggttgatttggttgtcggttggtttttagagatatttagggtggggaagattttattatttggggaaagtaatattagattgtttggaggggtttagttagcgtatttcgcgttttttgtttgttttttacgtagagcgttttgtttttaaggcggtaggttaagagcgcgagtcgaggtttaggtgtaaagaggggtgcggtatgggggtattgtagggtacggggtgtatgtatttttatttatttttttattgagtgttagggtaatttgttaatggggtatatttggtgatataaaattttttgtcgatttatggtagtttggaacggagtggaagcgttttatttttggggaatttttatatatatttggttgtgaacgtcggtgtttttgtattggagtttttttggagtgtgttgggtagagcggagaggtttttttttttttttttttattattttgtggaggtgttaatatgtagttagagatggttagtggtagtgaggagaggggggtaggaagagattagggttgggggtttgttagtttatagttttatttttgaatatttatggtttttttgtttaggttagcgaggttgggggtagagacgggtaggggttttttaatgttgggtattttttcgtttttttatattttggatttgttttttggagaaagttttggagtatttagaagttttggggttgttggttgaggtggggagtagagtttagttgtgtttggaggttttttatttttatttagtttttagggatagttttagttgtgtaggtttaggtcgttgaggttggttttagaaatttttttataattattattggatggaaaattagttttttaaagggttttagagttagttttgtttttttttttataggtttttatagttagagtatcgggtttttgttagagatgtagaagagacgatgtttttagtttttatgtggttcggtttttattgtggatgttggtgattttagttttttttttaaaattaagagggttgatgttttatattttaggtttttagaaagagtcgttatttatttatatcgttatattttttttttatttttttgtttcggaaagagtagagtggatatgcgtttttgtagaaatttatttatagtttgattgtagatgtattttgtttttttattgagtttttgttttatgaagtttgttttgtttgtatttttttttttttttttttttttttttttttttttttttttttttttcgtttttttttttttttttttttttttgttttattttttttttttttttttttttttttttttttttttttttttttttttgttttttttattttttttttttttttttttttttttttttgaatagttaaagatagaatgaatggtataggtaggtattgagttttttgtaattggaggtgtttaagtgtagggtggatgggtatttatagggtaggtattgaggaaggatttttttgggattgtggatggtaggataggttttgtggagttttttgagcgggtgtagaagagggagggtatgtttttgttttttgtttttttcgggttgttaggtcgttatttttaatttttattttttttttttttatttgttgggttttacgggatgggtagaggtattgttagaatatggagtcgcggtttatagagggttagtagggaggagagttttttggggattacgtcgttttagttattgtggtgattttgaaaataaatgtttttttttttgtttgagtttttgttgtttttgttgacgtggaattagggtaggttggtgatttagtttttatttttgtattgtatcggtggtaagttgtttttagttttagattttatagagtagggtgttttttttagaaaaatagtagggaggttaggatattaagggttttagggatagtttgttttttttggttggtatgagttttagttaagttttttggtattttgggggtgaggaggtattagttgtgtgttttagttattggttgttttgaggttgggtcggtgttaggttggttatttttttttgttttttagtgtgattttgtagagttttcggaagggttagagggtttttttttattattggtgtttatgggatattgtgtttttattttatttttgtattttagttttagacgggtgttaggaagttggagattttagttattttacgattgtgttttgcggggttggagtaggaataggagtaggaggaacgttttggttatgggattgtgtgaagagagaaggattaggaagaaaatatgagttattatgtttgggttatattttagtagagtcgttggtggttttttaggtatttgaatttattaattataaagtttattaggtgtgtaaataaataaatgttgtttaggaggtatagttagggttttgttggagagggattattttggaggggttatattttttatttagttttttagtttttttgttttgtgtgtgtgtagtttttgattattattatttttgtttttgttatttgtttttagggttttattaggttggatgttattgtaataaaatgtagtaatagaaggtttaggtagtgttgtagtttttggtggtattattagagttagtaggtagtagggttggggaattttaagttgatttagttttaagtgtcggagcggggagttcggatgaggtgggggtggggaatcggggagttatggagtagagtatttgttgtgttgaaggttaggagtttttttgggagattatgaatttagaatattaatattttgtttaaaaagttttttgttttggagataagagtttaggtcgttgtggttaggttttgttgtaaatgttttgtataaagtaggttggggggattattgggaagtttggggaatagattggttatgtgtttttttgagtgaaattttatggttgtattgaagcggttaggtagagggtgtgatggggtgtggtagttgtatatcggtttagttaggttgaatggggaaatgtaaatttaggtggtttgaaagagatttagtggtttatagtttggtggttgtttttagtataggtgatgtaaagagagaaggggtttcgggggtttggtttaggtggaaattatgtattgtttgtgattttgggtatgtcgaggttggagtaggtttgtttggtggttggtagaacgtatatgaagaatttatgtgtgttttgaacgttttttttgtttttttgggtttatgttttattaggagtttttcgattttgttattttgtaaaggaaattgcgttttgttattgtataggatcgaataggtgtgtgtggagtttttaaagttattgttttaaggggttttatgggataatgggagagttgttgtgatgtttaagattaaagtgatggttgggcgtagtggtttacgtttgtaattttagtattttgggaggttgaggaggatggattatttgaggttaggagttcgagattattttggttaatacggtgaaattttatttttattaaaaaaataaaaattagtcgggtatggtagcgggtgtttgtaattttagttattcgggaggttgaggtaggagaattgtttcgatttgggaggcggaggttgtagtgagtcgagattacgttattatattatagttcgggcgatagagtgagattgtttaaaataataataatgttaataataaataaaataataataataaaataataaaagtaaggatttgaataaatatttgtatatttatgtttgtagtagttttatttttaattgtttaaatgtggaaggaatggatatataaagtgtgtgtatatatagtggaatattatttagtttttaaaaggaacggaattttgttattatatgtgaattttgaataatgaattttgaagattttatgttacgtaagtttgttttataaggataaatattgtatgattttatttatgtgaagttaaatttatagagaaattggaatgacggttgttagtagttaggggaaggaaggatggggagttattgtttaatgaggatagagttttagtttgggaagttggaagaagtttcggaggtggatggtgttgatgggtgtataatgtgaatgtatttaatgttattaatatggaaatttggttaaaatggtaaatttgttttttttgtttttgttttttttttttttgagacggagtttcgttttgtcgtttaggttggagtgtattggcgtgattttggtttattgtaattttcgttttttaggtttaggcgattttcgtgttttagttttttagagagttgggattataggcgtttgttattacgttcggttgatttttgtatttttagtagagatagggttttattatgttggttaggttggttttgaatttttgattttaggtgatttatttattttggttttttaaagtgttgggattataggcgtgagttatggtggttggttaaaaatggtaaattttatattatatatattttattatagtaaaaatgtattgttttattagaaaaatgatagatttttataatatgaattaaattataagttatgaaggaaaaattaagtaaaatattaaaaaattatttataagtaattatatttaaaataaaagataataaatatataatttttattattttttaggttttttgtaatatttaattattgtttgttttgttgcggttatgtttttgaggttgtatttgtatgatagaaatattatattcgtggtgattaaatatttttttttagttttatttttaatgatgttatatagataatttgaaattggtcggttgggtacgatggtttatgtttgtaattttagtattttgggaggttaaggtaggtagattatttgagtttaaaattagtttggttagtagggtgaatttttatttttagtaaaaatataaaaattagttaggagtggtggcgggtgtttgtaattcgagttatttgggaggttgaggtaggagaattatttgaatttgggaggtggagtttgtagtgagttaggattgttttattgtattttagatcgggtgatagagtgagattttgttaaaaaagaaaagaaaagaaagaaattggttaaggtaggaatattgatattataggaataggtaagcgttataaatcgggaaattgagtgttgttgtttttgttggttttaggtggtcggttgttgatcgttaattggtatattattggaggagggaggtttagattgattcgtagagagattagaggtagaaacgtattatggtttggatgttgagggtgagggaaagagaggagttaatagtggtgttcggagatttggtttgagtaattaggtggatggtagtatcgttttttaagatgaggggttgtgggaatttgaggggttgtggaaggttttgttattgacggatttagggttcggtagttttgggaggtttattttgtgttaggttacgtagagataagattatttgggttttgtttttgggaagtttttgtttatgaggatatagtttgttatttaatggggtgtttcgtttggagttttagtgttgttgggagaaagttttttattttttttcgtttttcgagttttttttgtttttttgttagttgagtttttttatggaggttgtgtttggaggggggttatggatatggatgtgtgcgttaaacgttgttttttcgtggattttttttttatttcgtttttacgttttgtaagttttattttttcggggtttgatttgtggggtttttttttagatttgtttttttttatttttagaaaggcgtgtaggggttttttatggtttttttttttgtttttatttttttttttttgggatagtgatttgttggacgggtgggttatttatagggtttgtgattgtttagatatttttgttgtatgaagttttgattttaaggtatgatgtagatgggaataaggtacgagttttttttggttgttgtaataattgtcgaaattgggtggtttatagtaaggggaatgtgtttttttatagttttggaggttagaagtttgaaattaaggtgttagtagggttagttttttttgaagattttaggggaaaatttttttttgttttttttagtttttggtggttttaggtgttttttggtttgtggttgtattatttcggtttttgtttttgtttttataaggtttttttttgtgtttttgtatttttttttttgttttttagaaggatatagtattgaatttagggtttattttattttgagatttttgtttaaattttttttgtagagatttttaaatagaattaggttatatttgaggttttaagtgggtatatttttgttttgggggggattatcggtttattgtaggtttcgttgtgtattgaagacgtaggcggtttttttggttaggtttgtagtcggttttgtttttttttgtgatcgtggaagaatgtattttgttggatgtataggtttttatagtttttttgtttttgttaaattttagtttagttttttttttgttgtcggcgtgtattttttttgtttagtgttttttttgggattgtgtgtttaggttttgaggttttagaaaaggggggtggagggtttttttattattttgtagtaatgaggttttattaaaattttggagttttagattggatttagtttttagttatgattaaaggatagttcgggatatgattaaagggttagagaaagatgatttaggttgagaaagaggaggttaaggagtaattggattgtttttgaatgtggaaaaggtaattatgatttgaagggtggtgtttagttgttttttattttttttgaggataggaaaaaaaaggaaataaatgatgtataattagagtagttggttagatacgagggtgaattttttggttgggagtatggttaagttttgatttgggttttttgaaagagttcggggaatttttttatttggaggtttttaggtttggttatgtggttttgagtgattatattgaaggggtagtggttggggttggagtcggtgggttttgagtatagttacgaaggtatgcgtattttttggttgtttttttgttattgttttttgggtttttattttggtgaggcgtgtattttggcggcgttttttagggaattaaatatgtttgttgtattgtgcgtggagatggagaatgtataattggttgattttgtgttaatttggtggaattttatgttagttttgggaaagaataattgtatgggtgtgtttatatttattaggtgttttttagaaaaatattcgagaataatgttgtggtttaggatggttgttgtgtcggattcggtatttttttaggggggttgtgttgttgggttgagttttttaggtattggatttttaaatttttaaatacggcgtggataggtggtttagtaggggttggattattcgataggtttaggtgttggagtttagataagatatattttggtttggcgtggaagatacggggtgttattaatggtagtaatggttgtatttttgaaattcgggtttttaggtcgacgagggtgtgtacgtatttgaaatgtttgtggttttgtagtttttatgtttataaatttatttggttgaaaatagtttaaaatatttaaagtatgagggagggagtgtttgttttttttaaaaaggaaggatttgattttatttatttaaaaagttatttaaatttagaatatttttcgtaagagattttttgtttttcgtttttttagaatggttggagagttttagtatttttgtatatttgggatattttagagggggtggggaggggtaagtgggtagcgagcgattttagatttaggatgagttgttaggcgtttttcggttatatatttaagggatcggagtgtagttgtagcgttgcggtttgttgtttcgggggtgggggtgttgttttatgttgtgaatttttatatggtttttgattttgggtagaggtcgagggtttaagggacggggtgatagggagagtatgtaggagtgggtttttggttttttagggcgagtggaagaagcgttttttttttttgtaggtgatagatttggggggttttttttgaggatgagagtttgttgttttttaagttttgtgtttaatttaggtttttaggtttattttagtttttcggttttgtttgttttgtggatgatatagtttaagggtagagatcgttggtttggagggaaggttaggttttaggttagggtttagaagggagggagaagtttttggggtagttttttttttgtttatttattgtttagtttttttttttatattttttttcggaaacgtttgtttttgataaggtttattttttgtttttaggaggtttttattgtggaggaagggaggcgtcgttcgtttttggtttttttgatagtcgtgttttattttcgttttgtgttttttttttcggatagtgttttttttagggtttatttaggagggtgtagcggtggttttcggggcggtggtcgtggtgggggtgttagttgtaggggtgttttcggtgggtgggagttggtggtttttcgttggtgttatgggattcgtatgttcgttttgcgtttttcggtttttgagtttataggtcgggattttgtttgttagtcgcgtgcgttgtcgtttaatttttgtaggcgtagagcgcgcggcggcggtgatagagaattttgtttggttgtttaaatatagttttttgtagaaggattttgcgttcggggaaggggaggaatttttttttttttgggcgttcgtttttttcgttatggttcggtttttatattcgtttatatttggtcgtagcggggcgttcggggggaggggttgaggtcgcgtttttcgtcgttttttgggcgcgggttaggcggggaggaggggggcgtttcggtcgtgtgtttaggattgttttttagcggttattcgggttttagttttttaggtttggttttgataggcgggcggagtagttagtgcgagatagggaggtcggtgcgggtgcgggaatttgattcgttcgggaggcgggggcggggcgggggcgtagcgcgcggggaggggtcggcgttcgttttttttttttatttatttagttgagttagggggtttaggggttttttcggcggttagttttgtattgtaggagcgcgggcgcggcgttttagttagcgcgtagggttcgggtttcgtcgggggcgttttttcgtcgttgtttttcgcgcgattcgttgtttattagttattatgtcggatttcgcggttaacgcgtagttggatgggattatttcggatttcgaaggtgggtgttgggttggttgttgcggtcgcggacgtgttggagaggattttgcgggtgggtttggcgcgggacgggggtgcgttgaggggagacgggagtgcgttgaggggagacgggatttttaatttaggcgttttttcgttgagagcgtcgcgcgttttcggtttcgtgttcgcgtcgtttacgtgggggattttgttaggggtattcgcgtagattttgcgcgtttttataggattttgtgttcgttttgcgtattgtcgtttgggtttttttttttttattgttgtttgtgtttgttaagcgatagcgattttttcgagggttcgcgaggttgtttcggaattttttaggacgtatagttttattttgggaaatttatcggttttttttttttggtttttttcggcggttttcgggtttcgtttggattcggtaacgggatagggaggtcgttttttattttcgattgagtggatagtcgcgttttgttcgggtggatagttttttttttttttacgttagtttcggggtcgttaagttgtgtagttcgtgggtcgggagtatcgaacggatatagtttaggtcgtggtagggtttagagtgggatgttttatggtttttatttaggtttggggatatttttattcgttttttagaatcgggtcgtgggggatagaaggggtttgcgtgcgggtagggagagtattttggtttttttttgttttcggggtttataaagtgtgttgggatttgcggggttgttttgtttaagtttgggtttggcgttcgcgtttttgagtttgtgagtgcgtgcgtttttttgcgtttttttgattgtcggtgttggggttttgcgttttgcgttcgcgggagtaaatatagtaggcgaaggggaagtttatataatggtttttagcgttttggggtagggtttttgaggggcgggtttgtttttgtcgggatttggagttttcgtttttcggagaggtttttaggttgatttgggtagagttttttggtgggtcgggagggggaaaggttgtgttgaaatgagtaaattgtttaggtgttaggttaagttgggaggtgattagtttgaggtttttttcgttttatggttagaattagggttgatatttgggtgttttgagtttagttgtttatacggtttatttggggttagttttatttgagtgggggaggcggggttttttgggggattagaattttggttggacgttaagtagagtgttagtggttgttttttagggttgggtttgaggagggtgtggggcggcgaagggacgggagggggttgtgatttagtggttattggcgttgtgtagagtgtgagttggaaatatcgtagttattttgttagtttagtggtgaaagtttttttttaggttttatttttttgtatttttgttttttagagggaggggaggtttgggtttgtagagttgggagggtttgttgttttcgttttttttttttataatatttttttatttggatatttttgggtatatgtttatattggggtttttttaggtttattgtgtttcgttgagttttttgtagttttcgagtgaatgtgatttttttgtttttgtttttttgtaatttttttttgcgatcgtttttttaggggttttttttgttttaaatgtttaagtggtacgatttagtcggtttgattattttttagtaagtttttatggagagaggttttgtgttgtgtagagttttttttttgtttgcgggatcgaggtttttgtttttagtttttaatagaaagtgtcgggtttttagtgggatttttggggaagaattttcgtgttttaacgggagttttgtggcgggaggggaggttagggtttggggttgtgttcgttgtatagttgttattatttgtattatgaaagttgttagtgttttttttttgggtttttgggtgtaattttatttttgtttttatgtgtttttatttggagttgtttttgcggttgttttttaagttagttttgtgattttgtaatttagtttaagataatgggtttattgagattattttggtgtagtagttggtaattttttggttttgggggaaggttttttagtttcggggagtggggttttaatttgttggttttttgtgtttattagttttttttttgtgtgttttgaatggttttgttgggaattttggttttagagttattaggtggttcgagtcgataggcgtgagagagtgtgtgtgtgtatgagtgcgtatgtgtatgggggttgatttggggtatggaaaggtggttttttttggtgtttaaggagtttggagtatagttggagggtgtgggggtgtgtatatgggagttggataattttgggtggatagatagacgtggggaagggatgattgaaggaggtggaggagagagtgtgatttagtttagttaggggtgatgtggataggtagttttcgaattagggtagagaaaagttattattagttagtaggggagaagttagtatggaggaggcggattttgagggagagtaggaattggattgtaagaggaaggagagttttttggttagtagtagttagtagtagtgggggaggttggaatgagttggttggagagggggttggggtataaggaggggtttgtttgtgaagattatatgggttaggttgcggagggttaggtatgttcgtcgggagtgtagttggtttacgggaagtatttggagtggttgggaatgggcgtaggagtagcgtcgtgggagtataggtttttttttcggggcggtttatttggtgttttggtttttgtaaggtaggtcgaaagggtggggaggaaattgttagttttttatagcgttgggatggtggttttagggtttttgaggttagcggatgtgggtgtttgttattatgtgggttgttgaggggcggagattttaggggttattttaaagtaggacgagttttgagttacggtatttttgggggtagttttttaatcgagtagacgtttaggtttggaattttgtaatagaggttatagggttttgattagggtgttttgggaggtttagaattagtggtagtatatagggtagacggtaagtgatttggtatggggaaagaggtaggtgtttaggtcggtatagtatattcgtaaggaataggtagacgggaagtcgttcgtgggtttgtgtgtgtgttcggagttaaaattttgttaatgttttatgttttgggtatatttattttttttttggggagtatttttttttttatttttttttttttcgtttgttttttttatttagggttttttttatttttttcgttttggggatcgagggtattatggttttatgttttattatcgatgagttgtatagggatttagttttttcgttgtttaggtcgggttttttaggtttagggtttttaggaatggagagggtattagtgttttttatggatttaaatttttcgtatttcgtttttgttttttttttaagataggttttcgagttttaaggttttagggttttgtggaggtcgttacgtagtagtaaggagaatgttttgtatttggttgatgagatttttagagttttattttttatttttttattgtataaacgggtttttaggcgattgtagtattcgttattgttcgtaatagggtgataagagggatgattttttttttttttttttttttggttggtggaggtacggggttggcggacggtatgtgttttcgtgaatttaggttaaatttgttatcgtaaatacgattataattcgggtttttgtgtaataaaagtttttttaagtattagttgttggtttgttttgtttagcggtgtttgttgtaattagatttgtatatcgagaaagaatttaaaagtttttgatgtttgttgaaataatttggtttaggatttacgtgtttagattttagagttgtgtggtatttgagtttttttcgagtttttattgtcgttcgaggaggatttttagatttgtgttttggaggtagagtaggttgtgggacgggtttttgggtgggaaggattatgtggatatgtttttttgtttgagagttttaatattttcgggacgtgggagttggcgcgttggtaggatttaggtgttttttttttttttagagaaaaaggtttcgttgtttggtaataggtgtagatttgtttttaattaatgttagtaggttttttgcgtgatgaattttgttttttagttaagatttaaggtattttgtgaatattgtttttttgtagtttgagtttttgtggtgggaggtaggagttatggggagtgggggtaggttttttatacgggttttatagttattggtagtattgatttgatgttttttgagtttagagtttagggttagatagatttattgtttcgattacgagttggtttatttagaggggggcggatatagtatttaggtagtagatgtattgtgattagttttgtagcggggttgtgggttttttgggttggatgttcgggaagaggtaggtggaggtaaacgttaggatatttttgtagtgattgggtgattgtaggttggaaatgttttttgtgggttgtggttgtttaggaaggttttgaatggggttagtggatagagtttgtatttagaggggtagtgttttggaggagtgaggggtatggtagtgtagggatgtttaggtcgtttttattttgttattggaaagttgggcggtttcggtttttttagttttttcgtttgtttttttgtttgtaaagtggggttagaaatagttttttttgagggttgttgggggattttgagatgtagtttatggcgttgagtacgggttttgttttttacgggtgtggtgggtgtcgcggttggtgtggtatttgggcgggaaaagggggtatttgtaaaggataggtaggtttggatgtttaaatatgtagatttggggatgggaggttttaggtaagggtttgtgtgatgttattgtatgaatgaggtcggatagtatggttattattaattatggaaagtacggtagatattagtgttagtagcgttcgtttgggggtttttttgagttcgataggtatttaggtttttagtgtagttatgggatttttttttttttgtttggttgatattttggaggttggcgttatgttggttgtaggttttttttattgggaggttgttttggttttttttgttattatttatttttatttttattttggagtgttatagatgggtggattatatgtttatttgtagggttaagcgttgataatgaggtgagtatttgttggatgatcggattatgaggatagcgggggcgttggtagtttgcgttcggttttgtaggttggtttttttttgaaaagcggttgtggtagagtgtgtattttagggagtggtgtttgttgttttgaatatttttatttagtaggtttttgtaagggtttagttaagtgtggtgtagagttgggttggtagttggaatagttttattttgtttagtggtgagattaagggttgatgggttaaggttgcgtgttgtttgtttagttcgtggatttatttattgagtatttttatatttttatattgggttcggggtgttaggaggtggaggggggattgggtgtttggaaaaataagtttatcgagagtttgagtttttaggggttagtattaggtagttattacggtgttcggtatatagtggttatttggtttcgtcggttgttttggtggtggagagcgtgtatggtggtcgtacgtgatgggtattatttagggtaatatagatatgtagattgtgtatttgtttgtaggagttagggattttttagtttggtaatttgtgatttttgtttattcgttgggagagaggtgttgttttttgatagtttggtgtcgggagagtagaattagggttttttttttttttttttattttttattttttatatgtttaggtattaggggaggttatatttagggatgagttttggttattgggtttagggttttattgttgttattttttttttttgttagttagttaaatgttcgtttattatcgtgtcggggatggggttggtttgtttttttgaagtttttttggtgtatagtttaggttggagtttcggacgatttcgttattttttttttcgattttttttttttattttgatttattttagaaatttagttaaaaattaagtttttgtgtttttttttgataaagttattgaggaaaaatggttaaatattgtttttttttttaaagtttttttggttttttttaaatttggaggttttgagttgtttatgagattaaagggttcggaattttttggaatatagttttagaagtgggaggatttgttatttttttagttaaatagatttattagttggtttttagatatttttaggcgtttggggtatttttgggtttaggttgtttaatttggtttgtagagtttcgaggtttcgtttagattgggttagtagatagttttagagattttaagtttgttgtcgtttttaaaagttttgttaatgtttagaaatttagagggataagaagatgatttcgatgttagtcgggattataaatagtgaggttcgtttttttttttatttatgtttgtttttattgttttcgtagttgggtttttaggggattgttcgtggttatgggggaggtcgggaatgcggggtttagattttattgggtttttcgtatttttttgtttttttttgtttattttttttttcggaaatttttgaatatttttttatagtttttggtattttgttatttttggtatttttgggttaattgggaaagttattatttgtttaatatttagaaaattaaggggtttggttttaaatatattgtagtgtttttttttttatatggtatcgaattttttgtgtttttaaagttaggagtttgtgttttggatgtgggcgatggagttttgtagatatttggagcggtttttttgggagagtttttttcgtttttttatttattcgtttttttttttttgttttaagttttggttatagtttcggaggggttatttgagtgtaggttgtttttaggtgtatagttggaggggggtagttattttatatttttttgtttgttaggggtatttttagggatttaggttttgagggatagcggaagggtggggtggggagtaggtcgttgtttcgtgttatttgggtgttatgtagattttgaatgggtagtttttgggagttggttttttttttttattttttttatagtgttgtttttttgaggggttggagttttttggagttttttgtagtttgtggtaggtttttttgattttgtgtttggtttcgtagtttttaatttatagttagtggtatgaagaatatttttggttgtttttatttgtggtttttgtaggtagtagttttttggggtagggtttgggggttttggtatttttttgtgggattttttgggtatgagggagggagttatttgggttatagatagattttttttttgtatttaggaggtttaggatggatttgttttatttttttttttggtgggaagagagtatttttggttatggggaatgtggtttggatagagttatttagtttttttttttttttaggtagggttttgaaagatggagatggttttgtttttgttaggttaatagttagtagtttggtggatttttatgtagtttaggtaggatttttttttgtttttattttttattttatgtgtaggaagttggttttaagtagggatttttggtttcgttttttacgtgggtgggtagtttttttgcgaggggtaggttaggtttttgttttatgttttttagagatcgatgttatttatagtaagagtatataagtttttttggttttaaattaggtttggaggggtggtttttttttttgttttttgttttttgttttttattaaaggttagggaatggagtgttttgtatgtttgttggggttgggtttttttttttggtttaaaatgaagggttggaatttttggtgtagattgtacggtgagaggtgttttttgggatttattcgaggagtattattgttgaatgttttgttaggttaggagtatcgttgggggtgggagaggtagttggtttatttgtttatttaatagttatttatgggtattttaagggttagttttgttttaggtattgggggtttaggtatgggtttaggagaaggggtagaacgggagggttttttggaggaaggttttttaattagagatcggggtaggagtttgttaggtaggtgatgttggttagttttttttgttattttttttttttttttttttttttttttttttttttttttttgagatagagtttcgtttttgttgtttaggttgtagtgtagtggcgtgatttcggtttattgtatttttcgttttttgggtttaagcgatttttttgttttagttttttgagtagttgagattttaggtacgtattattacgtttagttaattttttgtatttttagtagagataaggttttattttgttggttaggttggttttaaattttttattttaggtgattcgtttattttggttttttaaagtgttgggattataggtgtgagttattgcgttcggtttttttttgttatttttgtagatttatagtgtgtgtggaagattgtatgtttgtgtttggtatagttgttttcggtatttaggtgggaggtgggggagagggttgttggtgttagtataggttatggtatgagataggttttcgtagttaagcggggtgtatcgtagtattggaggggttttgttgcgtacgagatttaggttttgtatttgtttttttttttaggaggtttggagggttgggagggattagggtggtgaaataatttaggtgggagagaggtattgttggagaggtagagggagttgtaggtttgtagtagcgagttttaaattttgggtttttattagaaaattttagaaagggttgttttgtttttttttttaaattataaaagaaatttttggtcgtttgggttttttggggtcgggtgggggaggagattttttattcgtatttttgtaggtttagtattgtgtagagggaggagggtggaggtaaaggcgagggaggagggtggaagtaaaggcggggtttttttttagtttcgttgttttgtttggttgttgtttttagatttttatttttggttcggaaatatggaattttgggatagttggggtagggggtatagaacggagattttggtgagggaggaattttttttttagttttggttgtggttatagtaaggttaggttgggaggattttatttaaatatttatattttttttaatatttaaatgatgaagtaggtttttgtatatagttgttttggagttagttgttgtttgttttatttttttttttttttttttttttttttttttttttttttttttttttttttttttttttttttttttttttttttgtattttttgtttttgatttaagtttaggtttttttagttgttttttttttatttataggtattttttgtgattgagtttttttttgttattttttataattattttttttaattgagtattttttaggtgttaggttttgggttggtattttgtatataaggtgttttttaatttttacgagagtttaataaggtagattgggttgttgaggttttagcgttggaaggtcggttcgggtttttttagttcgtatttgtatttatttattatttttttattgtggagatttgttttttggtttttggttgagtacgatggaaatttttgtttattagtttttggagagtggggatggttgagggtttcgattttggggtttgacgggggttgtttttgttttattttagtttggttgtttttttatttaatgattgagtttgtaaaattagaataatagtgttatttggttggtattttgggtggttgggaggcgtgggagagggtgtacggaggggttgagcgaggtgttagtatcgtggggattttcgagggtagtttttttaggtttagggcggagtgtaggtagagggcgcgatggtttagcgtgtcggtttatatttggttttgtttttgtttatacggtaatgtgggggagttattagttttttagtgttttagttttttatttgtgtaatggggataagagtaaattattgtttttaggtatggtaagtatttatatatattgattattgtagaatgaatatagtgagttttttttaggtttttattatatgttaggtagggtgttaggttttagtggagaggggataatgatgggtaagttggtttttgtttttaagggttgtcgagtagggaggaaggcggcggttgttttgattgtgattcggagtggggtgattcgtaaagaggttggcgggaggttggttgggggttggttgggggttgtttttttttttgtttgtgtttcgtggtagggtattaaattggttttttttatggattttcgaggttttgattgtgggatttcgggtaggttttgggattttgtgattttgttttcgtttgttatttaggtttttgtttttagtagtgtttagtatacggcgatttttgtatgttttttagtgtgtgattgattttggagttgagatttggtagttgaggttggatattgtttttggataattttcggggaggtgggggtagggtggggttgtgagttggtaatttcgagtttttagtagttttcgaatggaggttttttttttgtaggattttcggggaggaaggaggggatgggggagatgaggtttgtgagtttttaggagggtagaggtttatatttgtagcgttttagaaatatttcggggtgtttaggtttatttagtttttttgagttagaattattaagagttggggattagtagtttattttttagtaagatttagaaatgatttttttgaatagttcgagttaagaatgatatatttggaattagaatattagaattatagaggaatcgagagaacgggtttaaaatgtgtagggattttagttatatggcgttatatggaggaaagtatttaatattattattgtatgaatttgtttaaatatatatatatatatatatatatatatatatatatatatatatattttttagtaaagagtggaaagatatttgttagaatattgatggaagttatttgggttgtgggtttatagattttttttttttgtttttgtgtattttgtaaattttcggttttgtgtttaaattttttttatagttaggaataaagtaatagatgttattttttaaagtttatgggttcgtgttcgtaattttaatattttgggaggttgaggtaggaggattttttaagtttaggagtttgagattagtttgggtaatatagggagatttttatttttttttttttttttttttgatagagttttattgtgttttaggttgaagtggcggtggtacgtttttggtttattgtaatttttgttttttaggtttaggtgatttttatgttttagttttttgagtagttggattatagatatttatatttgtaggatttgagaattttataagaggaaagtttttattcggaggttgttggggatttggagttgttagtttatatattttttagtagagatagggttttattatgttgattaggttggttttaaatttttgtttttaagtgatttatttatttcggttttttaaggttttaggattataggcgtgagttattgcgttcggttatgggagatttttttttaaaataagaataaaaataaaaataaataaaagtttattgttaaaaagaaaaatatattatttaatttaatttttttttaggattgagagatgaggaagtagaggtcggaaagtgttatattttttggtcgttggtagttaggggatttgaggtttgggttggttttttcgtgttttaggtttggggtgttaggtggagtttttgttttgtttaaaggtttaggtgtttttgttagtattgtttgtttttgtatttttggttataaggaatgtgggttaaaggtagggtttttgatttttgtttaggagggtgaagtgggttggttttttttgtttttgttttaaggtttttgcggttgtgtttttggaaattgttggttcgagttagtgtgcggagttgggatagattttatcgtggttttcgtggggttattttatgttcgggttggaagggatttttcggtttagttttttttgttttttattaggaaattgagattagagaggttatttgtttggttcggggtggggtgtagatggcgtttgtgatttttgtatgttacgtgtagatagttttttagttgtgggttttttacgtaagtagttatgttggggataatttggttgaaatttgcgatttaatgaagagaagaatgattttttttgtagttttgtgttttataggtttttttttgtttttattttttttgtagaggggttttatgttggtgggtgggtttttgttgttgtaatgggtttaggtagtttttgggtagtggaggtttggttgtttttttgtttaatgttttttgtagtttacgttgttcgggaagggcggggaagtatttagttattggggattttataagatgggtatttgggagatgttgattggtaggttaggttttcgtggtttataggtaggttagaggttatagtgttgagttgggttgagttggtagtttagggtagtgggggtgggggtattttgtttagttatgggtttttttggtataagggtttggagtttattgtaaataatttttttagttttttttttttttataggttattagtagaattgaggggttttttgttgatgaggtgtggtttgggaggggttagttgtttgtttatttgatttttgcggataggtgattataggttttttgttttagggggttgggggaaagatcggggaggtttttttggtttttttatttggaaggaaaatacgggtataggggagatattttatagggatatattttagttagtattttttggttgtgttgggggtatagtgtttgttttgtttataagaggggttagttttttttaggatttaattttagtttttagtgtagggtagatgagtatttagaggtttagaggatttatattacgagagagaagttgtgattatataggtattgaaggttaagtagaagagtgggatatacgggtgatttgaaagttttagggttagtgtggttagttttagatagttggggagttttgggtattaggtttagtaggggaggagggttttcgtgatagtttgttggggttgttgtaataaagttttacgaattttgggggttgaagatggttttagaggttagaagtttaaaattaaggtgtcgattaggttgattttttggggtttttgcgggaggtttcggtttaggttttttttttagtttttggtggttttcgggtgtttttgggtatgtagatgcgttacgttattttttgtttcgtttttatatggttttttttttgtgtttttgtgtttcgtaaggatgtttgttattgtatttagagtttattttaaatttaggatattttttttttgagattttttattgtatttgtaaagattttattttaatttttgttatatttataggttcgagggttagggttttggtatgttttttgggggttattatttagtttattgcggtagttgattttaggggaagtagaatgttttaagtttggggtgagcggagggaacgttgttgggtggggagtgggagattaggttcggagatatcgcggattttttttgtttgatgagggcgtgatgaggtttttattttaggttttttgaatggcggttgtttttgaggagatttttttttttggatttgtttttttagaaatttttatttaggtttaggttttaaggtggatggtaagaggcggttgtttttgttatatttgatgggtgagtgtgtgaacggggttgggagtaggatatttgttatttttgtggatagattttagaggtttatgaatttgttgttggggaaggtgtttgatttagtttgattttttatttttattttttttttttcgtttttttttattagttttgtttttagagttttatttttttaaaggtaggcgtcgttttttggattttttagtagttattttttattttagattttttttttgtaggtttttttggttttagcgtttatttttttttgggtttttgtttttttatcgtgaggtttttgggtagaagtgtggggttttttcgttgtgtttggttttcgcggtatattaggggtttttttaggggttcgttttgttcgttaggtttttagggagttttttaagtttttagatgggtttgatggagttttttaatgcgttgttttagagtaggaggggtttcggttgagttcgagagtttttttagttatattttgggttgtttggggtagttaggtagttcgttttttggaggtgttgtttttttttggttattttttttggaattttttgcgtttagttgcggttttttttatatagtatatttattatttttttttatttgtgatttttttttgttaatttttttatgtttttgagaatggagattaggttttttttattttggagtttagtagaatttaaattaggtagattcgtgtaggtttacgtgggggttttgtggttattgtggttttgtcgttatttttagtttagtttggcgcgttttggattatgttatttagtgtcggttttttaaattttttttttggttttgtaggtttgggaagtagttggtttttgggtgtagttgtgatcggagtttgaattttgttttttggggttatcgttttttgtaattaggttgtagtttatattggttcgggtagaggttatcggttgttcgttttggggttataatatagagagtttcgtgattaatggaggttttatttgggttaagtggtttttggtgttaggcgtttttttttttttttttttttttttgtattttttaagtgtttgtaatattttttttaatggataatgagacgaggagggagggaggggtggtttttttgtttaggtagattaggaatggttatcgtttgtgtgtgtagtgataggtttgggaatagataagggagagtttgttcgggaggttggatttttatatcgatgttgtttgtgtttggtagttttgtttcgggttttagaatagatattgattaatacgttttttagggtttttaggttcgggttttggttttcggtagagttttttatttatgggaagaagtatcgagtagttttgttggtttttcgtagggagttgggatgtatttttaagagtagtatgcgtgaagttcggggtttgggtaaaggagtgtttggggaagagtttgttgttgttggagggtcggaagtagaggggaaggaggggtacgcggtaggttgaggaggtggttggcgattttgtggtggggacgagggggttatgagtagattaggagttagtattacgtttttttgtttttagaatcgaggacggagagttgttagagaggttttggcggggtgtttggggttatttaaagggcgtgggtggattaaagttgaggaaagttttattttgggggatttcgtatttaatttttgaggtttttagagttgtagtttgtggtttttcgaagttaattattttttagggtttcgtttttgtttttagcgatagttatttattagggagtttttgatttaaggagatttgaaaggttatttggttttttttttatttttaggtaggttatatttagatttttttatatagattcgttttatttttttgttgttttttattagggacggagggtgggcggtttttttatttaggttttggcggttttattttagttaggaaattttttttttttatttgttttatatttttttttttgcggttttcgtttatttttttttaatttgtttttagtggagtagttagtagttggtttagaattcgggggtggggggagcgttagattagtgtagtatatttgagagtgtgttagaggtgtttttatttttatagttgatttagtaaagaaaagaggaagtttagtaatttagcgttattttaaagttcgtttggaatgattttgtggttgtcggaattaggggtacgcggtagatgacgggagtaggtatagagaggttttcgtttcggattagtcgttgttgtttttttggaggttgggttgttttttaagaagaggatttaaggttttgtgagcggtggttttttttggagtttttattgtggttttggttttgttttgcgtaaagagagatggtttgaagtagaagttgttacgtggttgttttaggtaggcgttcgtagttttagttattcgggaggcggaggtaggagaatggtatgaattcgggaggcggagtttgtagtgagtagagatggtattattgtatcgtagtttgggcgatagagtaagatttcgttttaaaaaaaaaaaaaaaaaaaaggagtagagaaattttttttagaaggtttgtagttattttttttttatgttttagaggtaaaaaaaaaaaaaattgtatatttcgttttttttttttttttttgagacggagtttcgttttgtcgtttaggttggagtgtagtggcgcgatttcggttcgttgtaagtttcgtttttcgggtttacgttatttttttgttttagtttttcgagtagttgggattataggcgttcgttattacgttcggttaattttttgtgtttttagtagagacggggttttattgtgttagttaggatggtttcgattttttgatttcgtgatttgttcgtttttgttttttaaagtgttgggattataggcgtgagtcgtcgcgttcggttatacgtttttgtttttgaataggtggttttttgattttgggtgtggttattttaagattttgttttggtggggtataattttggttttaggtagggcgatcgtataatttattgttttttgggggatacgttagtgaaagggatttttgaatgattacggtgggataatagatgtgagttgggtttgttttaggaaggttggatgtatgggttttttgagttagaggagataatagtagaaagttttgcggttgatgggatcgagtaggagaagggtcggcggaggttggggtaataacgtatttgtttattgtgaagggtttgtgtgagttgatggttgatgagagggtagtggggcgaggttgttttttgttaggttagattagttttaggatatttatattttttttttagaatcggtgatttagtggttagaaggggttttagaattgacgggatattgagggagtcgaatggaatggttggagtggttatagtaggttttaggttttttttcgttttttttttgtgttttgtttttggggtttatattttggggttgttgtaatagagtgttataatttgggggtttataaatatagttttcggcggtttttggagatttttggcgttttttggtttgtagacgtattattattatttttgatttttggtttttgtttttacgtggttttttttttttgtttgtgtgtttttttttttttttgttttttataaagatgtttattattggatttagggtttattaaatttagaatgattttattttgagatttttattttaattatatttgtaaagattcgttttttaaatgtgattatgttcgtaggttttaggagttaggatttaagatatatcgttttgggggatattgttgaatttattatatttaataaatttagagttggtgttaatgttttttgcggatattatagtagattttggaggttttttgtaaaggaattcgtaggatttttttttttttttggagggatgagattgtagttgggttggggaaagttgttggtttaagttggggttggtttagttggtgttggtttgttaggttgttagagagttttatttagggagaaattaatattataaagttgggggataagagaaggtttggaattttaagggttggttgttgaggttagttgtttatttttttgtgttttattttatagggatttaggtttgttagtgtttcgtttttggaaggaatgttgtgggttgttgtgttttataggtagggtggagggtttttttgtagttagcgagttgttttttttgtagcgtgtagagggaaggaggaggtttgtttattttttttggttttagtcgaaaatttaattataggttttggtattaggtagatttgtttatttttatattattattgtagagtgagttaggttttttgggtggggttgtgatgagtaggaaggattttcggagtgtttgggattttttgggtttagggttgttagaggtagagagaaagaagtttttttttaatatttgagtaaagatagttattagaatttattagagtggttttttgtggtttttttttgggtgttgatttttttggtgtatttgaagtttttagggatattattgacgttttttgtatttttatttaggggttagtggaaatggttttttttttttttgtttagaggtattgtggatgatgattttaggttttagattttagttattgggttacgtgtgtagataagtttgggtagttagtaatttttggttattaagttggttttttgcggattgggtcggtattggaggcgggttttagttgttagtattgtggtttagttaggtttggttttgggaaggtagagggggaggggattgggaaagggattgagttgggggtggggtggtattttggttttttttttttagatttttggtaggtttgaattatttggttgcggttttttaaggagggagcgtttttttcgttttgatgtggattttgttttttgtttacgttgtttttgtttttaaataaatgtggttttttgtggggagtttgggggtcgttttttattgatattgttgttttttggtttttttttgtaggtttcgtttagttttattgcgtttatttttaagtttttttttttggacggttttgttttttgagaatatatttttttttattattttaattgtgtttttttttttattcggagtttgttttatttgttttaggagttattttttttttttattaagtagtttaggttaattttggagggttaatttgtgtttttttagaagtaggttttgagatagggattttagtgggaggggatattaggggatgtttgagtgtgggaatgggttaggtagggaatttagttaataaagggtgttttattagtttattgtgattataggtggttgtttagtttttatatcgggtagtatggggagattgtagatcgtgtttttagttttgttttatttggggttgggtaagggagttggggtttttatattttagtttttggttaaggattgtattgtttattttttttagtttttcgagggtttgggtattaggaaaggttttgggtggagatacggaaataggttatgtgaagttagtgggcgtgattggtagtagtaaggttaggatagttttggttattagtaaggtgattatatattttagtatgtatagtttttatagatatatatttaggagatggtaattatattagtaatagttatttttgtcgcgtgttatgtttgtatttagggaattttattttttatttatttatttatttttatttgagatggagttgcgtttttgttgtttaggatagagtgtaatggtataatttcggtttattataattttcgttttttgggtttaagttattttgttttagtttttcgagtagttgggattataggtatgtattattacgtttgattatttttgtatttttagtagagatggggtttttttattttggttaggttggtttcgaatttttgattttaggtgatttatttattttagttttttaaagtgttaggattataggtatgagttatcgcgtttggttttaggggtattttattattttattattttttatagtaggtgatattgaggatattgaggtttagagtagattgtggttatgttatttttttgtttggtttttttgtttttagttttgaaataaagagtacggtttttgtgtaggtttatacgttttgtttttagttttggagtagtttttaagttttttgaaggtatattaggtttttgggtttcgttttttaagttttggataaataggaggtgaaggagtttttgtaattggattttattttgttagcgttaaggttttgtttgattatttattttattttatatagattagggatttgtgttaaggtttagtgttataggagagtgaagataaggaggtgtttatggcgtatatgttgttggatttattttgtagattttaagggttatggggagttatttgttaggtgaggttttttcgtggtttttttttgtaggtttagggtagtatatagggaggtgtttttttattttttggtattatttgttcggtttttttgagttttgattttggtttttagatagttagtgtttttttagggatagaatttgttttgttgttgtttagaggagatttagtttgattagggttagcgtttttggaatttgagtttggaattttattttgttttgggtagaggttacgttgtttttttttacgagagttgagttgcgtatgagattattttgattttgggttttattatttttttgtatgatatttgttttaggttggagtagggttttgtggttcgtttggtgttttttttttagattgaggtttgatatgtatattaggaagtgtttgatttggttttaggagttgggagcggtttgttaggtagtttgtggttagagtaggggttttaataatggttttttgtgcggtatatttttttttaaataggtttaggtttaggttgtttttgtttcgatttcgttatgggtttggaggggaaagtttgtatttggagggtggtttattgtggtttttttttgtgtagtagttgagatcgtaggtgtttgagaataggagaagttttgtgtttattttgggttgtgagatgtttttttagaggtggggatggggatgggttagtatgtagttatttatattttttagtttgttggtattaaggtttgtgtatgtgtgtgtttttttttttttaattttgtttttttaatatggagttttgttatttgtttaggttggtttcggatttttggtttaagcgattttttagttttaggtttttaaagtgttgggattataggtgtgagttattatgtttagttagtattaaggtgtgttttttaagagtaatattggtcgggtgtagtggtttacgtttgtaatcgtagtattttgggaggtcgaggtaggcggattatgaggttagtagattgagattattttggttaatacggtgaaatcgtgtttttattaaaaatataaaaaaattagttagacgtggtggtcgggtatttgtagttttagttattcgggaggttgaggtaggagaatggcgtgaatttgggaggtggagtttgcggtgagtcgagattgcgttattgtattttagtttgggcgatagagcgagattgttttaaaaaaaaaaaaaaaaaagaataatatcgatggttttattttttgaatatgttaagtgatttttatgtagtataagtattttagaaggtaggaaaatgtaatgaataatatttatcgttatttattttatttagagatcgttattttttgttcgggtgtgagtgtgtgtgtgcgtgtaaattgtatatgtgtgtatgaaatggaattaggatttttgtatatattttgtgttttgttatttttatttaatattttcggtattttttatttttaaaaatgtgattttaatgatggtgtaggtttttgatatatgggtttagaaaatttgcggaaattcggattgtttttaggttttgttagtttaatgttgatgtaaatgttttcgtacgtaaatttttttgtatttttgattatttttttgggataaatttttagaagtgggttaaagtatatgaacggtttttaggtttttggagtaagttgagatcggtggggattggagaagggatttagggaggtttttgggagtttgcgagattggagtttggttttaggggatttgaatttatagatgaaggagatggttggtaaaggtgggaattttttgttttatgggtgggggggtgatattgttttattttttagtgatagtatggggatttttttaatatgatttggtttcgtatttttttgatattgtgtacggtttatagttgtgatgtttagttgggagttttttttgtgttttttagttgtattaattttttgtagatagaggaggaagttgttcggtgtttttttttgttgcgtgggttttttgaatttgtttagttgggtttgtggatttgtgtagttacgtacggggttttaaaatttgtaaaatgataagtttacgaatattttcgtttttgtgggtgaatgtggatattttttggttgcgtttttttttatagggaagatggagacgtgtaaagtgataaggatttgttatttttgggtaggttatgtcggttttattgtgaggatggtggtagggggttttttaggaggtttgtatattgggaagagaggggcgatcgtgtgtgattgtaggatttagggcgtagttttaggattttgatgggggaggagatgttggggagttttgttttgttagtttggtgatagatattttttaatgtttttcggttgggtataatttataatgtttttcgtggggaggtaattgtttatgaggtatttttggtagggatgattttgttttattgttatatattttagtaatgaaataagaatttagagtgatgtgattttttcgatgatttttttaattatttggggtttttgtgcgattttaagaagggggaaggaggtagttttcgtttttttgggtttttgatgtggtagttttggaatggttacgtgttcgttggtttatagtgggttatttgtcgaatgtggttgtggtgggattggggttgggttggagagtgggtgattatattagttagttttattttgggttattgtgtagttaggggttttatttttttaggggtttcgttgtgagtgttttggggttgttggaataaattattggaaattaagtggtttaataaagattgattcgtttatggttttggaggttataagtttgatattaaggtattggtaggattatatttttttcgatagttcgaggggaggatttttttttgttttttttagtttgcgttggtttaggcgttttttggttttggtagtatttgtagtttttgtttttattacgtagttttttttatcgtgtttttttgtgttttaagtttttttttgttttttttttataaggatatcgagtattggatttagagtttattttaaatttaggatagttttatttcgggatttttaattatatttgtaaagattttttttttaaataaggttatattcgtgggtttttggggttaggtattagatatgtttttttgggggttattagttaattttttatagaattttagacgaaagtgaatttttataggttgaaatgggggtgaaggtttagtgcgttttttttttttgggagtttttttagggtttgtgtttattttgtgattttgtgatttagttttttttttgagatgaagttttgttttgtcgtttaggttggagtattgtggtacgatttgggtttattgtaatttttgtttttcgaatttaagtgatttttttgttttagttttttaagtagttgggattataggcgtttatttttatgtttagttaattttttgtgtttttagtagagatagggttttattatgttggttaggttggtttcgaatttttgattttaggtgattcgtttgttttgggtttgttttggttttttaaagtgttgggattataggtatgagttattacgtttggtatttagtaggttttggttgttttttttttttgagatagagttttattttgttatttaggttggagtgtagtggtgtgattatggtttattgtagttttgattttttggttttaagtgatttttttattttagtttttcgagtagttgggattataggtatatgttattatttttggttaatttttgtattgtttagtggagtcggggttttgttatgttgtttaggtttgttttgaatttttgggtttaagcgatttgtttattttggttttttaaagtgttggggttataggcgtgagttattacgtttggtttagtaggttttttagaagcgtttgaggtttggtgaaggtatggtgttatggagtagagaatatttaattttgttttcggggagtcggaatatatttttcgtagttaattttaatagttatgacgtggttaggatgatatggggagggggtggtgtggattgtgtgggaggttagtttttcgggaagggggttggagtgggtttggttttgaggaggatttttaagaggaggaggaggcggtggtatgttcgtttggggggatggcgtgagttagggtgggtatttttttatttaggtgttatttttttgatattttagtcgggatatggtttttttggggaagatggatatttttagagtggggtattttttggggaagatggatattttcggaatggggcgttttttgtttttattgtttttttagtatatagttgtatttttttgtagttttggaggttgtgagattttttggttgttatttagaataaattcgtttttgagtagcgtcgttttgatggtggggtggtttttgcgggtggaatagtttttgttgttttagagtttattgagagttagtgggtatgggagtggtgttggatcgaaatatttagagggattatagagttaggtagtaagtatagaggttagttagtggggagggagggatttatttatgaaaagatattaagtattgaaagagaggagaggatggttggggatcggtatatatgtgtattttgcgtagatggttaaggtggtgaggcgttagttacgtagataattggaggaaggaggagtgttttaggggaggggttagtttcggttttagaatgattcgtttgtgtacgtgggtttggttggaataaattattgtattcgtatcgtagatttaatcgtaagtttatattagggtagtttttgttttggtgtagtgttttcgattatgagttggttatggtgggggtgattttaaggggatttttaaggagggggtttatcggattttttagggaaggttatttgtttttttgggttggatttgggataaggtttttttttgtttagtttttgttttttaatttgatcgtacggaaggatgttgaggatatttggaagtcggtttttgttttatagtatttataggatagaggtatattatgtggggatagtttggatagtgtttaggaggtagggagtagattagaggatcgcgggaggttttgggaatcgtacgaggatttaggtattgagttttgtattttttggtattagttcgatgtatagtttggttttgtgtttatttcgtattttattttttttatttgtacgggggcggtaataatattttttatagtttaggtttaagcgggtgtagatgtgatgagtttggtaagtttattttattatatttagttttgggtattgaattttggattttttggttggtagaagtggatatttaatttttttttggggttttggggtttttgtagaattagaatatagttagtagtttgtatgtagggtgtagagggatagagggatattatgtcgggagtttatatttggtatatttttgattttggggtttagtgttttgttgttttgcggttacgtgattagttagaggttatggttggatttataggcgaatatagtttgtggatttgattttgtttggttttgcggtgttttattttatttttagttttagtttgtggagatagagtttcgttttgttagttaggttgagtgtagtgatacgattttagttttgtaatttttgtttttcgggtttaagcgatttttttgttttagttttttgagtagttgggattataggcgagtgttattatgtttagttaattttttatttttagtaaagatggggttttattatattagttaggttgtttagtgttttaaaaagggtttgttttgttttgtgttagtatttaaagattaggagatattatataaagatttagatttttatttttttgagaagtgaatagttttggttacgtcgggtttatattttttagggtagtgacggagttgagatagggtttgtgataattgagagttttttggagtttatacggttttttgtttagtttttggtggaggttgagtttagtgatttaggatttcgtttgtgtttattaagaaggagaggtgtttgtggtttagagagggcgtttataggagtgttttgtttaggaagttggtagttgaggcggttagggttagggggttgggttttttttttttttttttagtgtttgagtgtatttggaggaagagagacgggtgaggggaaggtattgaaattggttttggagcgttattattgggggttggggattagttgttatttttttttttgtgggtaggggaggtagtggtgggattttatgagattcggattttgtggtttggtgaggtagggagcggttggggagatattgtgggtttttataggggtgcgttgtgggtttggtttggggaaggagttggtgaatgtgtttgttatgtgggtttttttttgttttggttttgataattaggagcggttggtttttatttggagtgcggttgtggggattgtggaggtggtagttttttaggtattatttttattgttttcgagggagtagattttggtggagaggtaggatggttgtagggcgggagttggtggttggtattattgtacgggtttgtagtagtggatgggaagatgtaggagaggttgatgattgagaaagttggtttttgtggattaagttgggggagtcggataattaagtggttagaattttgggttttggtattagtttgatgtatagtttggttttgtgtttatttcgtgttttattttttttatttgtattgggggtattggtattttttatattttagggttaagcggttgtagatgtgatgagttcggtaggttcggcgtttcgtcggtattgaaagttttagtgttcgtttttagtgttattgatggggttttgtttttgttgcggttttgattggttatagttgcggttatttattattggaggtatgtttttcgttgtggttgatggtagaggtgtgtttgttggtggtgttttagtgtgtgttttggttggaggtgaggagggataaaaatagtcgcgataagaaggaaattaaggtcgggtacggtggcgtacgtttgtaattttagtattttgggaggtcgaggcgggtggatcgtttgaggttaggagttcgagattagattgattaatatggtgaaattttatttttattaaaaatataaaaattagttaggtatggtggttcgtgtttataattttagttattggggaggttgaggtaggagaatcgtttgaattcgggaggtgtcgttgtattttagttagggtaatagagtaagattttattttaaaaaaaaaaagaaggaaataaaagttttttttggaattagaacgtttttatgtagacgtagttggagggggaggttgtgtggtttgcgtcgtggttatggtaagatacgacgggtagtatttttttattttagtttgtatttttgttttagaatttatgatggtttttttaggatggggttgtttttttcgtttgttgagatatgaaggacgggaagagattttcggtttttatcgtcgtatcgtttgtttttttttgttgttttttagtaggaaatatgtcggagtgttttttagttatttatttattaattgtattttttttttttattttttagttttgaaaagattttttgaggtcgaggaggtcgagatatttaattttattttatttcggagggtttagatttttttatttcgagttattgtggttagttttatttagaaattttaggatttgggcgtgaagaatttagaattttcggttcgttatgtggattttttaagttaacgtttttttaaggcgtttttgcggagggtggagttttcgggttttaaggcggtcgagtcggtgtttcggcgtattgagttgtttattgatatttcgtttaagtaggtggagaacgtcggggttatcggttcgtttcggttcgggtttaagagggtcgaggtgttgggttataagacgttagaatcggtttttcggaggacggagattattatcgttaaattttaggagttagtttatcggaggatggagttttttgtttttaaggttttcgaggtgtttattgtttttgttatcgacgtagtttttaagagggtggagatttagatgtttaagtttgttgaggcgtttatcgtttttagtttagtttagattttggagaatttagagtttgtttttgtgttttagttgtagagtaggttggagtttaagttttagttttttgtggttgaggttatatttcggagttaggagggtgagtcgtagagcgttaggttttggatgttgtggtaatggggggtttggttgttggttttgttatagaattttggaggaagaagttggatatggggtggagggtgttattttggagatttagaaagatcggaatgtatgggggtgggggtttgtaagtttaggagaggtggttttttttgtttgatgggaatatgttaagatgttttaagcgggatttgaatgagagtttggaaagattttttgggttttaaggagttttttttatgggttatcgtgggttttgttgggatttttgtttgttgtgtgtttttggagggtttgggaggtttagagaatgaggagttacgtaggaattagggtaggtttatgtaggggtgtaggatagggtggagttgagatttttagaagggttgttatattttggtggtttttgtttgaggaattgtaggttgtttggatatgtttagtagaggtcgagggtttggggaagggaggagggacgtatgttttttgaggtttgtattggagtttatggtttggttttttttttttaggagggatggttgtggtagagggaggggaatatgaggagtattttagtttgtaggataaaatttttagggtattgggaaggggtgtttggattagggggttgtgtgatagttgtatacggttttatttgggggtgtttttttggcgagaggagagaggttatggggttttagtagcgttttgggagggtttaagtttatagtcgtgttgatatggagtttataggtaggggattggtgttagttttgtgggatatagggtttgtttggaaatgttaggttgtgggatatggttgggtttttttttagaagcgtgttttttggttttagtagggatcgtggttttatggggttatagtaaggtgttagttgggttagaagttttttaagagttaggtttgattttgggtataggattagaatttagtaatgtttagtaagttttttttaggttggataaatagtatagtttgggtttttgatttagttgttgttttttatttttaatcgtggtgaaatatataatatataatgtgtaattttagttattttgtagtgtacgttttagcggtatttagtatatttacggtgttgcgtagttgttatcgttgtttattttcggtattttttttatttttttaaattgagtttcgttttcgttagattaagttttttatgttttttttttagttgttggtagttattattttattttttgtttttattatgaatttatttgattattttaggaattttgtgtgtgtggaaaaatataataattgtttattttgtgtttggtttattttatttagtatgacgttttaaaggtttattcgtcgtgttgtagtatggggtagaatttttttttttttagaggttgaataatattttgttgtgcgatgtatttgtgttgtgtagttgtttttttatcggtggatttttgggttgtttttatatttttttaagtttttttttttattttttttgatttttttttgatttttttgagatagggttttgttttgttttttaggttggcgtgtagtggtgtgattattgtttattgtaatttttgttttttgggtttaagtgattttttagttttagttttttaagtatttaggattataggttgcgcgttattatgtttggttaatttttaaattttttttgtagagataggtttttattaggttgtttaggttggttttaaatttttgggtttaaatgagttttttgtttcggttttttaaagtgttgggattataggtatgagttatttaatttttttttggtttttttttttgaatgagagttttttagtggttagtgggtttgggggttgggaggatgtggggtttggagagggtgtgggtttggggggagattagtgttttttatgtttttatgggtatgtggagtgtatatttgttttggcgggtttggggtttgggattttgtattttttatagagggggtatcggaatatattgagtagttagaggttagtgggttttggaaggtttttttcggtttttagtgtgcgagtttcgtgtttttttttttatttttttaagtttgattttgaagagttattttgttttagttatttagatttagtgatagtggttgttggtggtatggtgttaggttaaaggtatgggtagtttgtagagtggtaggaggttgtttttttttttgttttttgttggtgtaggatttttgtttgacgtgtcggatatatttttattttgggttgatgtgtttatatttagttgagttaaataggatgtggttggggaggcggttgttatcgagttatttaaatttcggtgatggttggtgttggatgtatagggacgtggttttggttttgggggataggtagggggatgtttatggggatgtataagaatatttttttttaggggtagatatagtttagtttttaaattgtgttagagattgtgtcgggagttaggtttagggatataatttgcgggttttgttttttggagtttatcgagtcgtgagtaggatggttgggatataaggagtgtttagggagtttttttagtagtggaagtataattttattaggttaggaaggggagagaaaggtaggttacgtggaggtagtagcgtttagagttgttaggaatttggcgttttggggggacggtggttttttttatggaataggatgtatacgttggagtcggggtatgggagaaaattattagtattttagattcggttatttacggatagggatttgtgtaggtgggagtttagtttacgtggagaggttcgtgggttgggttgatagttttgagggtttaagtaagtttaggtggaggaaatgtagggatagacgagggtagggtttttttaatggaggagtgtttttgaaattcgatgggagtggtttttcggggggtttaggtttgagttttattagtttttttttcgaggtattatttgtttgttttttcgttttttttttttgtgttacgatcgttttggatacggatttagttttttttaatttagttttttgtttattttttttttaggtttatttttttttgtttttttatgtggggttgggttgggagttttttgagtttcgatatgtatagttttgattaatttttgcggtttttttgtttttcgagtattagggatttagttggtattatggggaaaggaattatggagggagtttcgtgttttttgagtagacgtttagttttttggtttttgtttgcgggagggtatttgtgttgtggtttgtttttattttagagttgtgggtgtagggtagggttttttggggttttagttgaattgtttttagattgatttttttaaagtatagtattgttgagattttttttcgtgttgagttttttttgtttatttattataggtttttttacggttgatttatttttttgtttagtttatattttttttttttttagttttttttgttttggtttttttttggttttttatatttttttttataatttttttgttttgattttttgaattttgatttttgtttttttttatattattgttttggtgaatttttatgtattttttaaaatttggtttaaatatttcgtgtttggtttgggatataaatgatttgtgtataaatttttttttttttgttagatttttttttttaaatgtgaaagtagttttttagattataaaaagtaatcgagtattttttttttaaaatgtaggaagtatagaaatgagaaagaatttaaaatttatttgtaagttagcgatatttatgtttgaggttttgttgtatagtttttaaaattttttttatgtttttattagattttgagggtagggttgttgtttttgtttttttttgtgttttttttttgttttttgttttttgagatggagtttttttttattatttaggttggagtgtagtggtatgattttagtttattgtaatttttgttttttaggtttaagcgatttttttgttttagtttttcgagtagttgggattataggcgtgggttattacgtttggttaatttttgtatttttagtagagacggggttttattatataggttaggttggtttcgaatttttgatttcgtgatttatttattttagtttttttgattttttaaagtgttgggattatgttatcgtgtttagtttgttttggtttttataaagaattttataaggggttaggtgtagtggtttatgtttgtaaatttagtattttggaggtcgaagtaggtagattgtttgagtttaggagtttgggattagtttgggtaatatagagaaattttatttttataaaaaatataaaaaattagttaggtatgatagtatgcgtttgtagttttagttattggggaggttgaggtgggaggattatttaagtatgggaggttgaggttgcggtgagttgagattgtgttattgtattttagtttaggagatagagtgagattttgttttaaaaaaaaaaaaaaaaaaaaaaaaaattttataagatattaagtaagtgatttggatataataggtgtgttatgaaattatgttgaaggagtgagttattggtggtgagttgggatggtttttttgtggtttttgtaggtagatgtagtgatttttatgggtcgtttttagagattaagtagaaatttttttggttaattttatttttaggatatttggttttttttttggaggttgtgttggagggtttagtgggtgggtgttggttttagtgtgggggttttggaaggagttagtattttaggagggagtgtgggtatttagatggttgaaggggagggagaggaagagaggcgttgtagagggtagaggtatttttgtttgttttttcgttttagggtttggtgaggtttgagttttatgttggtggggtggattttcggttttcgaggttttggttttgtttttggatttggtattttttttgttgtttttttatagaagggcgtttattttttggggttatttttggtttttttaggttttgggtggggacggttttgtttttttttttggatttttgttttttttttgttttttaatatgggtgtttttgggtggagtggggtggggttgggttgtagtatttagtattgagtttgtaagggttggttgttggtttagagttttttttattagagttattttttttcggttttttagttatattagttaagtttttttagagttgttttataaggcgggtgtttagcgttcgtttatgggtttggttttttgtttttttgggatgtttattgggggtaagagggaggttaggtttagtgtttagtttagttttgggtatgttttagttttgttttatgagttaattggttttgaattattattttattttttttagttttaattttttgatttgttaaagaggtatttgtagaggtggttgggggttgagtttttatgtatttatttattttaagaattaagaagggagtttatagtggttttggggttatttgtgaatatggatgtgaaattggggcggggtagatatggtagtatgttttagtagtttttttgtgatttagagggtttggaaatttttgttatgtgggtggagcgttgagggagtagggggttaggttttttcgagttgatgatggtgggcgtggtttttcgtatatttggttcgtatcgggtcgtgtgttttaggggtagaatagggaggaattttagtatagatagtagggttgttagtatagcgttgagtatagggttaattaaagtatagggttttttggaattatttaatatagagtagtgaagaggtggttttggggaaagtggggttagagttgagtttgagtggggggtggggagggcgggtattagtttgtaagggagggatatttattgggttttagaagtttttggtggggattagggattgtgaagttggggagagggtgattattgtgatttagggaggaagggttttatagatagtttagtttttggtttcgtgtttataggatattttatataggttttgagtttatttttggattgtggattttttgaggtagggtgtgtaggttcgtttagtattaggtgtaaggtagggggttttggtaagcgtcgagggatttattggtgtttgatgaagtagtgagtttggatcgtgttatgtttcgggttttgagtttgtaggatttttttgtggggttgtgtgtttttgtttttggaggtgtttagaaggtattgacgtttttgtcgggatgttttattcggaaggtttcgttgtttttatttttttttatttttttgagttgtttgtagagggtatttaggtttttttttattttgggattgggtttttttttttttttttttttaagaataagtatttttttttttcgaattgtttttggagttttttagatttaggtttagagtgggaagtttcgtatgtgttgggggaataggaattaatgcgggaggattggttaggttcggtgtgtttttttcgtggtgggacggggtggggttagagaatagagtttggttttagagtttaggaagagaattttttttttcgtcggtttgttaagtatcgtgtagtggtgagaggaaaggagggttggttcgggaatgtagcgggtgtcgagtagttgtggaatattttaaatagagcgtagttgcggggaagggtggggttaggaggtaggcgttgggggcggtttttttgtttcgttttttgtagttttgtggttttgattatttagtttggttttaggatggagtttcggtttttagatatatggtattgggtgaggtcgttttttagtatttgttttaggaagttagagtagttgttagaagagagaggagttgtgtttgtattcgtcgttttttaggttcgggatagttgtcgggattgagggtttgtataatggcgagtttgttcggaggggcgcgtcgcggttagatagttatgttttgtgcggtgtggatagagggtatatttagttttggaggagcgtatttagatttttcgtttcggggtttaaagtgtgggtagtttttaattagattttggattttagtagatagtttgggaggatgttatgtggtttattttgatatattgttttatttgtgattttatttttgagagttgtagggaggcgtttttttagttggattttatttttttttcggggttttttgtgggtgttataagtgattttgttttttttagtttaaggggggtttttggggtatgggttgtaattgataggttagagtagtttatggttagggttgagtttttttttcgttttttttgaatattgggtttaggaaggggttaaagtggagatgttttgattaaagttgagggaggtatggagtttttttgattttgtttttttattttattgttgttattgggtgtattttgtggagttttaggatttttaaagaatttagagtggagattttcggttttatttagtgtaggtgagggggaaagtgatttgtttatagttatatggttattattagtatatttgggttaagttcgattttattttacggtttttgtttgaaatttggaattggaaatggttttggaaattattgattttatttgtcgttttttaaaatggttcgtagaggttaagatatagatttttgtaatgttttgtttattcgtgtgtggggaaatggtagaggagtatcggttttgtttttatattgtttgggttgtcgtttttgttttgtttagtggtttttttttttggttcgtttttttattgtggaagtgggtataattttttttgtgtagcgtggttagagtggatagtgatgattcgtgaagtagggtggagcgtttgggggattcgtgttaaataagtatataaataaaagttaatataatttttatttaattagtaagtaggttttgtttgaagtttttgggtagtattttatgttatttttaggttttaggtcggtggtgtcgtttcgtgttttttttattcgtaagttggtgtttagaagttttgttttgtgttttggtttttattttttttgtgatttttttttttttttattttaaaaagtaatgtacgacggggcgtggtggcgggtatttgtagttttagttgtttgggaggttgaggtaggagaattatttgaatttaggaggcggaggttgtagtgagttgagattgtgttagtgtagtttagtttgggtaatagaataagatttttatttgggaaaaaaaaaaaaaagcgatgtttagttatttttagatagaaaatgaagattatatgaaatttggaaagaagttttttttttttattttttaatttttttttaaggggtggttatgttgatagttgggtgtggtatttttttgaattttatttttgtagagttatttagggtttgtgtaaaaaaagttaatgtgtaaatatagattttttaagaatataaaggaaattagatttttgttattagtttttattttttttatttaataatattgttgttatttgtagatgtagtacgtttttttttttttttttttttttttttttttgatagagcgtggtttaggttggagtgtagtggtgcgattttagtttattgtggtttattgtaatttttatttttcgtttttcgtttttaagcgatttttttgttttagttttttaagtagttgaaattataggtgtttgttattatatttggttaatttttgtatttttagtagagacggggttttattatgttggttaggttgtttttgaatttttgattttgagattcgtttatttcggttttttaaagtagtacgttttttttaatggttgtgttattagttgttttatggttttgttaggtttgtttagttttttattgtgattgagaggttgtaatagatgttttcgtatttgtatatgtgtatatatgattgaaggatgagtttttagtgaatttttgtgttaaggatgtgtgtatttaagttttgatttgttgggtatagtggtttatatttgtaattttagtattttgggaggttaaggcgggttgattatttgaggttaggagtttaagattagtttggttaatatggtgaaattttatttttattaaaaatataaaaattagttgggtatggtggtttgtgtttgtagttttagttatttaggaggttaaggtaggagatttgtttgaatttagtaggtagaggttgtagtgagttaagatcgtgttattgtattttagtttgggtgatagagcgagattttttattaaaaaaaaaaaaaaaaaaaaaaaattgatttttgtttttgaattggtttttaaagtggttattagaattttttaggattttttttttcgtcgatttgtttagttgtttgttgggttttgtgtagtgatggtttagtagggaggttttatgttttttatttttggttgagggttaaatgttttttaattggtgttttattttgtgtatttcggttaagcgagagggattattttttcgtatgttataggttagggttttgtgttttttttttatttggaaggtgtattttttttttgttgaaattttttaaaaagagttttttgtaagttaggcgtgatggttaatatttataattttagtattttgggaggttgaagtgggcggattgtttgagtttaggagttcgagattagtttaggtaatatggtaaaatcgtatttttgtaaaaattagttgggtgaggtggtgcgtttgtagtttcggttattcgggaggttgatgtgggaggattatttgagtttgggagtttgaggttgttgtgagttgtggttatattattgtattttagtttgggtgatagagtgagattttgtttaaaaaaaaaaaagagttatttgtatatttttattatagtaggtacgagtattttgtttttagttgtttatttttgattttgtttttgggatgtttttttatatagaatattttaattttgatattgttaagtttttgtttttttttttagtttttggaatttatattttgtttagaggttttttgcgttttgaaattataggaaagaattttatttacgtttttttttagtatttttgtggttttatttttatatgttgaaattatgaatttattggaatgtattttggttttagtagcgaggtaggggtagatggtattgtttggatatatagtagcgagtttggtttggagcgggtggggcgtgtgtgtgtgtgtgtgtgtgtgtgtgtgtgtgtgttatttttattagttttggtgtttgtattgtgttggtttagtaaaaataatttggatgtattttttttattttttgttttttggaatattttaagtagtaatataataatttttttgttaaaattttttaagaatttattcgtgaaattatttgagtttgatatttttgggggagtttagtattttaaaaatttaaattttttttatgggtttgtgagtttgggagtttttttttttttttaaaatttattattattttttttttagaaaagtgttttttagtttatttaaaattcgttagtttatttcgagggggttgttttagttcgtttagtgaggatagtgtgtagcgcggtgattgatatgattgattagtagagtacgatcgattagtcggtgtgtaaatatgattgattgtggttagcgttttgggatgttttatgttgaggtatatgtgtgtagtgtagggtgatgtgtattttgagaggggatgaagttataggatttttgtatttttaggagagagtttttttttttaaggttgtagttttgagtaggtagtgacgggattgggtttagggggttgagtggttttagtaggttaagggttttaggaattatgagaagtttggagttgtttagagagtagtttttaaaattagtttggattgtagtttttagaaagatatgcgattgatattacgaattaggatatatttatatatggggtgggggtggggatgggatgtattaatgaaattaaattttcgtgatggaatttttatttttattatgcgtgtgttatatttagtatttttttttttttttttttttttttttttttttttttttttttttgtttgtttgttttggagagagggaaggtttttttttatttttttttaaatagttttattgagatttaagtaagttattatataatttattaatttatttatttatttatttttttgagacggagttttatttttgtcgtttaggttggagtgtagtggcgttatttcggttgattgtaattttcgttttttgggtttaattaatttttttgttttagtttttcgagtagttgagattatagatatgtattattacgttcggttaattttgtatttttagtagagacggggtttttttatgttgaggttggtttcgaatttttgattttaggtgatttattcgttttagttttttaaagtgttgggattataggtatgagttatcgcgtggtttaatttatttatttaaagtgtataattttatggtttttagtttatttagagagtagtgtaattatcgttattataattaattttagaaaattgaaaatttgagaaatttagaaaattttttttttaagaagaaatttcgtagtttttagttattaattttgttttttttttttatattttttttttatttgtgtggattttttttttttttttttttttttttgagatagggttttattttgttatttaggttggggtgtaatggtttaatttttgtttattgtaatttttattttttaggtttaagttatttttttattatggtttttcgagtagttgagattataggtttgtgttattatgttcggttaatttttgtattttttgtagagatggggttttattatgttgtttaggttggttttgaatttttgggtttaaatgatttttttgttttggttttttaaagttttggaattataggcgtgagttattgcgtttggtcgattttagatattttttgtatagagaattgtacgtttggtttttgtgtttggtttttttatttggtgttatgtttttaaggtttatttatattgtggtaggtgttagtgcgtttttgagtaatattttattatggtatggattattttattgtggatagatatgttgtttttattagttgagggatattgggttgttgttatcgttggtgagtgtattttttttaaattaaaaaaaaaatgttggttattatttattagatcgtttttttggtttatagggtgggataagtcggtttgggtgagggttaggaggtggttaggtggaggcggttggagcggttttgggttgtttttgggcgtagtaggtagaggtgtaatggtagagtttgagtaggttttttgggcggatttttatgtcggtaatgtttgtttatttaagaagtttcggttaggcgtggtgttttatatttgtaattttagtattttgggaagttgaggtaggtagattatttgaggttaggagttcgagattagtttggttaatatggtaaaatttcgtttttattaaaaatataaaaattagttgggtgtggtggcgtgtatttgtagttttagttattcggtaggttgaggtaggagaatttgtttgattttaggaggtagagtttgaatttaggaggtggaggttgtagtgagttaaaattgcgttattgtattttagtttgggtgatagagtgagattatgttttaaaaaaaaaaaaaaaaagaaaaaaaaagaaatttttagtgttgttttgtgttcggtatcgaagtcgagggaaggtagtattagtatgagtttttagtttatcgggtttttgtttggagttgacgtgcgattaaggtatacgagggaagtatggcgaggtggacggtgcggaggtataaggagtaaaataaggtagatgtagtggtttagtggtttttggtggttgcgaggagcgtgggtaggatagttttaggagggtatttggagagtagggtcggttggggtaaggtgtgttaggtatttgttaggagtaaaatgtaaggggatattaaagagtttaggaattaatatagatagtatttaatgtagtattttttaatatcgaaatgatgtatagtaatttttatgatgaataaatgttggaattttaaattaagataggtttagttttgtacgtgtatagttttgttagagtttgtttagcgtggaatttgatttgtttaaaatgttgttttaaaatattgtttgatttttggattttttggtattgttttaatttttgtatttggacgaaggttttattttaattttagttggagagggttaagggttggtgaatttggttttggatttgtagagtttgtggtatttgagaggtggggttaggaataggaaggagttggtgagaacggtattcggtatgggatggggttagattagagtagtattgtggttttttttaattcgtggttttgttgttggatgtttggcgttggtgttgagttttcggttttttgaacggagtgtgatgaataacggggtcggggagtttttgggtttttttttgaagtagtagtgaagttagggatatgtcggtagtaggtagggagagggacgtttggtttgtgtttggagttagttgttttatggaggagttgggtgaggatgcggtgggaggaagatttttttagttttgtatttttcgaagtataattgagtgtttgtgtggtttgggggttattttggttcgaggatagttttgttttgtttagttaggttttgaagagttatcgggatacggatagtagttttgttgggtggtaggttgtttattttcgtttatttaacgttggaattggatgtagagtatttggatggttagttttagagtgtttttgatatttttagttattttattttttagattaggataagatgcgggattttaatttcgagttttttatgggttttattttatgtgtttttataagttattgggtttattttttggttttagggttgtttggttatttggtattttggtttttttatttgtataatgaaaataatagttttagttttttcgaggagttataagatgtttttcgtgtgaaaaattgggatttggtattagattatttggatttgaattttggttttattttttttaatttgtggttttgggttaatttggtttttttgtttttagtttttttatttatagagttattttattgagttgttgggaggatgaatataaggaagtgtatttatgtgtttagagtattgtgattttatttattattattaaacgaggtatataataagtgtttaatagatgtttagtgttattttacggattttgtgtgttttgtgtgtttttagtagttaagttttggaggtggggaagttgttgacgagttgtacgaggtaattagaaagaggaggttataggtgtaagggtttgggtgatatttgtggatagagagaggtcgatggattttggtagaggggaagggggtttttgtatatagaaaatgttttttgtatttaagatttttgtgattttggaatagaggtagtagaggtttgtaaattttaaattataaatttagaaagtatagaatattcgtagagaggattagaaatattatatattttagtgtgtatagaattttttatatagttaaataaaagtacgtttttaattgaagttgttggagagtttttgaggattttatattagataagggtcggtaagtggaagtttaatacgtaggagttattttttttgtttataaatgtttgtcgttttttttgtttatattcgtatttatgtgagggtatttataggtttatcgtttagttttatgttttgtttgttattaaaaaattttttaagaattttttagttgtaaatttttttatcggagggggggttttaggaatttagttttgttcggggttggggtattttagtatttgttgtataggcgttggttattaaaggttatgtgtcgtattcgtgggttttcggggtttggtggtatttgggtatatagtttagtggcggttttttatttgttagatattgggagtggggggttttttatttttgttttttggcggtggggggagtgtttcgagttgttatatattagaatttatcgatttatacgttgcggtattttatagttttttgatagttttttagtttgagagattattaaattgagtttttggagagggtggttgttgaggtttggatataggtgtggataggatagttttgttttatttcggagtttcgtttcggtttagttttttgtgggtttgaagtttaggttgggttagtttttgttttttagatggtcggaaaggtagtttagttttacggtttttttgttaggttttgagagtcgtttggtttttagttttgtttttttttttttttaagatggagttttattttgttgtttaggttggagtgtagtggtgttattttggtttattgtaatttttattttttgggtttaagtaatttttttgttttagttttttgagtagttgggattataggcgcgtgttattatggtaggttagtttttgtatttttagtagggatcggtttttattatgttggttaggttggttttgaatttttgattttaagtgatttgtttatttcggttttttaaagtgttgggattataggtgtgagtcgttacgtttagtttttagttttgttttgatttttttttaaggtcgtgaggatgtttacgtttttttttttttttacggtttattgatgtttttagatgttttgtaaagttatttttttttcgggagttttttagttggtgacgggggattttttggggattattgtttaggtagttatgtaggtttgtgggtcgtgtttttaggttggatcgagattcggtgtatggggtgtttttggtttgagttgaggtttttggaagttatagttaggaggtagtaagggacggttgttatgtttttttttttttgttttttagggtttttgcgggatagatttttttgtttgagttttttggttgtttatattttggttttttaaagtttagtttgaagttttaggtattttataatttgttttttttagtagtttgttttgttttttttttgtcgatgtttttgaaatttttttgtttttttttattttttggttagagagagattggagattttgtgggaattttcgaggggagggagaaggtcgttgtttgaacggaggtggtttttttttttgtttttttttaggcgggttatatttgtaggtttagttttttgttgtggtagcgtttggggtgtcggttgttttttgggtacgagttgggagttgagggaggcgtttttaggatcggagtggtaatttagttggaggaggagtaataggttcgtggttagtagtagtcgtcgtagggatttcggcgttgtatttgtgttttagttgatttttttcgtttttttagggtgggtcggggatggtggtttgttgtttagtttaggaagaagaggggtcgtaattagtagtagttattttaggggattttagcgttgtatttgcgatttagttgattttttttttttttttagggttggttgggaatggtggtttgttgtttagtttaggaggaagaggggttgtggtttttattttagaggtttttttttcggtttttttttcggtgttggtttaattgtaggtttgttttaggtcgtgtcggtatttgttgattgacgtttagcggatgttgataggagagggttgggatggggaagtagtaagtttcggttattgtgggttcgggttatagatggttgaggtattttttggttatttttaggaagtaaggttttacgtagttttcgatttatttattgttcgtgtgtattttaggaggttgtattttttaaggtttttattaggtaattttattgggttgggtgtcgttgtaaaattatttattgggtgcggtggttttttggtggggggtatggttggggaggatgcggtggaggagaagttagtttcgtggttggggggagggcggattattcgttttttgtttgttttttgaattggagtttatggttttttttttaggtgtttgggttatggaagaggttatagttttgttttatttttgtggtagtttaggggagttttggttagtttcgtgttttttgggagggcgatagtttggttaggttgtagggtaggattggaatgtagatttttgtttggttatgttgttgtttggttgttttgtttggggattttttgtttaggaagagagaagcgggtcggatagttcggtttagtgattggaagtttagttttttatgtttagtttagtaggaagtttgttttttcggaatatttgcgtgtttttgtatgtgtttttttggttggtggttttgcgaggtttttattgggttgcgttatgttttttggttattttggttttggtgtttggtttttgtgaaatagagatatttgggtagttttttatttgtgtttgtaagtttgtgtggttttagtgatggttgattttgttttatttagaggatttgggaatttttagtttaattgtttagaggagttttttttagtggggagagtttgagttgtttttttggtggatagttttttagattttaggcggatttttttgtcggtcgttttttttgttgtttttgtttttttgttttttatttgttttttatttttttttttgtagtagttagttggtacggggatttttttttttttttgggattgtgaatgagacgatttttttggtttttttgggtttagatttttttggtaatagttagtgaaatttttgttttaggtgggaggagaaggtttagtatgtggttataataacggttttaattatattatttttaaacgttggtttttatttattttttgttttgtttaatagttatttttattattttattttttagattaggaaattaaggcgtagagagttttagttatttgtttgaggtttttatagttaagtgtttggatttgaattttggagtagtttggttgttgagttgttttggagacggggtattgtgtagtggtcggggtaggggtggagttttgtcgtcgttgattttcgggttatttggagtgataatatagtttagtgtttgggtttttgtttgagattttggttggatgttaggagttcgagattttttagtttttttttgtgtaaggcgttatggggtgaaatgaaagaaaattttagttagaaggtgtttttttttttttttagttttttagttgttttggattttgaaataagatatcgttcgtttgtggggtgagtaggaatagattggaatcgtatttttttttttttagttatagttgttaggagtttatttttttttgttttttttttttgtcgtttttttttataagattgggttggatgttgttgggaaagttaataggaagttttttggttgcggtggaggtgggggtttgtgtttttttggggatcgagatgagggttttaggttggtttcggtaagagtagggaggtttacgtttttgtttgttggttttgttttttgttttgggagaaggtatttatatgttttagaatgtattttttgcgtgtatagggatggtttttgggttatttatttgaggtttattgatttttttttttggaattggagtggtttttttacggtggattgggttgagttttttgtttcggtcgacgtttttttttaggtatttttttttatcgtgttagggtgtaggttgttagtggatgggtttttattttcggggattggtagttgttacgtttattttatagtcgagatattttggtcgaaggttttgttaagttttatggagtgtagggattttttttgagacggtttttttttgtcgtttaggttggagtttaatggtttaatgtttcgtttattgtgatttcgattttttaggtttagtagtttttttattttagtttattaagtagttgggattataggtgtgtgttattatgtttggttaattttttaattttaatttttttttgtagaaatggagttttattatattttttaggttgaattttaatttttgggtttaaatgatttttttgttttggtttgttaaagtgttgggattttaggtatgagttattgtgtttagttggggtttttttttaattttttttggttttttttaggtgtaggattcgggttttagttttatgtgtttttgaatagttttgggttttgttttgtattttttgggcgcgtggttaggtttttcgtgatattagtaggagatttaggtgaagaagtaggtagaacggaatgtttgtttatttagtttcggggttaggcggggcggttaggatagtagtagtggttggtgtggttttttgggaggttagtttattggcgtggttagcgaatggggaggggagtttttttttttgtttttttttatttttggtttttgggtttttagggttaggtttttagagttttaggtggaggatggaggttagggaagttggggtaagagcgggttgggggtgggtggttaggcggattttggaaaattattttttgtaggtttcgttttttttagggagtatttagggttggtttcggggagtcgggttaatggttatttcggatggtgtaggggtttatttttatgaaatcgggtttatttttatgaaattgggtttatagaagtttttggtttcggttttgttttgttttttggtttttgtttttaaagtaggatttaggatagttttgaattttttgtcgaaatgtagttttttgggttttaatttagttttttagaattagagtttttggggtgggttttttgtttgtttagtagtttttaggggatatttgtgtttgttagagtaagtttaataagtattgttgtaaatttttcgtttttatagttttttggttcgtttttttttttttgttgggatttgtattaggattaaatgttaatattagggattaggttatatttgtgaattttgagataatatttgtattttttttttttttgaggttgttttgttcgttttgttatttaggttgaagtataatggtgtgatatttatttatggtaatttttatttttagggtttaagtaatttttttgttttagttttttgagtagttgggattataggtttatattattatatttggttaatttttgtatttttagtagagatggagttttattatgttggttaggttggtttcgaatttttggttttaagcgattcgttcgttttagttttttaaagtgttgggattataggcgtgagttattgcgttcggtttgatatttatattttgattaagttgttgtggaaatattgagttttttttgatagttttgtttatagagtgaatgtttaggaatcggcgaggtattttttatttttatttagatggcggtttggaggtagcgtttttgattttgtgatgggatttgttttttttgtttaagagattttagagatgtggtttttgaatgtgggggtttttgttggggtgggaacgggagttggttttggttattgtttagtgattttattttagtgtttcgattttagtattttcgattttagcgttttttttttttcggtttcgcgcggagattacgtggtttgcgttgagtaattttttattgttttcgtcgcgtttttgttgtagggaagtttttttagggagttagttgatatatttggtttttattatttgtttttgaataggaatgaaaggagagagtgagtaagaaagtggtaggaggtgggggttgtagagtaggggaaggttagagagaggggaggaaagatttggaaagtttaggtatgtgttttggaagtaggtgttagcgatgagtttatttggagggtggtcgttcgttttgagttttgtttggggttagtagggaatattttgttagggtatgtcgttgggagtttgtttttggtttattttttgttgttttgagcgttgagtagatttgtttttattttagggataacgtaaggaggttgttattttattttttattttattaatattttatgaattataagtgattatttattgcgttttgacgtattttaggcgttgggttcgaagttttatgcgttttatgggatgtatttgtattatcgtcgtagaaaacggtttttgttattattgtagagaaggtatcgaggtatagagaggttgaggaattggttttaggttatatagttagaagcggttgattttggttgtgaatatagggttgtttgattttaaagtttgagttggtttgtagcgaggtttatggtttttgtgttattgtttgagtttttggtcgagttttttggtttagtggggggtttagtgatttattagttgttttattatatgttgtggatatttttacggtttatttgggtgggagggaaggggttttaggaggtgggaggggtatagggaatatagtttagtttgtttgggtttaatattttgatttttaaggtattttttgagggtagtatgaggttaagtttttgtttttttttaggattttgtttttgtgagggtttcggggttttttgtttttttttgggggttttgttggttaggattatagagaagttttttgttgttgatttttttgtttttgtattttttggtaagttattttatgatttagttgttttgtttgtaaaatgggttgaataatattgttttgtttcggagggtttttgggaggattaaatgagatttgttgtatagaagttttttgtaagttatgttgattggcggtcgtcgggtttttaagtgaatgggtattcgggtattgagtgtgtggatttagtattcggaaggaggggttggggggtatttagaatttttgggaggtttggatttttgttttgtttagattttgagtttttttttggttagtttaatttttattagtagggtgagggtaattaggatttacgtatagttgggcgaagtcgagtgattatatgtggaagtttagcgttttttatgtaaagtgggtaggcggttaaagtgagttttgttttagtttttttattttcggggttgtttttggcgttttgtttttttttagagttttattgatttgtattatgtgattcgggtttgggaagatgggtttagttgtgggaggtcgtgcgggttggggattgagagtgtcggaggagggttttttaggaaaatttagttgtataggaagtcgggttagcggttttcggaagtttttgggttttgtaagttggattttttagatttgtggttgtggggtttttttttgtttgtagttgagagtttttgattcgtatttgagggttttagaggttcgggagggggatgtgatcgtgtttttagggtgaagtttattcgagtgttattttggatatagtttttatttttttttggttttttttttggttatggggacgttgtttggggggggtttttttatatggaaggagttgtagttgagttggcgggtttcgtatatttttaaggtcgtttgatttttagtttttaagtggggttgtatttattatttaggatttggagttttagttagagagggattttttattgtttttttttttgttttttgggaaaggtagggtttttgtgtttttttttatttagggatttggtatgttgggaggttaagaggaagttgtttttcgtttatttattttttaatttttttagttagtagagttttatttgtgtgtttagaatttgtgcgtggagttagaagttataaggttggtttagttgtgtttgattttggttgtgcggttttggatagttttagtttttttggagttgagtattttgatttgtagaggagaggttgttgtgtcggtttcgtagggttttgtgtagaggggagtgtgtgcggttgtgagtttaggttatgtttttagattggaggataggatcggaatagtgggttaggatggttagagggttttagttttaggaggaggtttttatattttttagtatttttatattaggaaatgtagttaggtttttaggttttttatgttaggaagtagtatttcgttttttatttttggttgtttgggtttgagaagttgagtatttttttcgaattcgagtgttttttgatttttgtttgggtagttgttttttttgaattgatcgtttgttttatatagttttttgtggtttgttcgatagggtggttagcgagttttttgtatagtatattttttttaggagtgttgtttgtgatgatggtgtaaagggtgttttttcgagttttcggaggtatgtagtggcgtaatagcgtgagtttaggagtttcggtgagtttttggatggagaatttgtttagattattttttagtttaaattttttttgggtgtttgttgtgtttggggcgttgatttatcgtggggcggtttgtgagattttacgttatttggttattttttttagtttttgtttattgtatcggttttttggtttggttgtttttggaatatgagggtttatttttacggaagaatatttatttgtttttttttggaaagtttttttttagattttttggtcgttttatttaggttttgttgaagcgttgttattttggagaggtttttttgttattcgtagttaaaatagtttttttatgtttgtgggtggttttttatggggtatggatgagtattggagagttttgtcgtttatttgtttatatgttttttgggagggtaggggatattgatttgtgttgtgggtgttttgtatgttacgggtgtttagtgaatgtttgttaagtattaggggagtataaaggagggaagtttttgtttaattggagtagttagggaagattttttggaggaagtggtatttggtttgtttagaatgtggcgatttgtttgtatgtagatattagattagagggtaaaggttattattataatttagtagatagttataagtagttaaggaattgttatgatatggattgttcgtgattggagttaagaaggagttagagatagaggtttttgtgttttggcgtgagtttttgggggaggttgagtttttagaatgtggggtcgtttgtgtagaggtcggaggtgggagatatatttgtgagtgtcggtgagtgtggggtgagttattggggttggattagaagatgggaatttttaaatttattaattagttttggtgttttgggagtgataggagacggggtttttgggggattaatttagtataagtggacgagatgggatgtaggggaaaggataaagttttttgaggttttgggaagttgagttagggtagagttatgatagggtgagttttagaagtaatataagaaaaaatagttagattgggttttttttttattgtgggagatgttttattttatttttttcgtttttcgggttttggtaatgggttgggtatagtgaatgggttttatttgtaggagtggttatattttttgggtatagttgttttatatattgtattgagatgggattcgaggtcgggaagaatagttttttttgtaggttgatattgttagttttcggggagggaaggacggtagggggtttggagtatttttttttgttatttatattttgtgtttgtttgtagggttttgagttttgtttgttttgttttagttttggttaggaatttgttggagtttataggggtagttaggttggaataggaggagattaggtcggtaggggagtcgagagggggttttggatagtatttagggttgagttattttgggtttgttcgatttgttatttggagttgttttcgtttgtttattatgtgtaaggttttgatttattcgggtttgtttaattagcgtttttttttaggtttagttagtttggttttcgttcgatttatttattgttattagtgttatttttgtattacgtaattagtttttgtagtatgttagttattaagtttagggttttttgtgtattttttgtaatttttatagtaattcgggaggtatagagaggttgagtcgttggtttatagttatatagtaggtatggggtattgttaggatttagtcggatttttgattttagggtttttttagggttttgggtgggatattggtaaggaagtaaggtatgaatattggttttgttttggatagagttcggggacggtggtttggtaggtttagttgatatagtgattttggtgtaggtttaattattggtaaagtgtttaagtatatatagaattttaattggggagataggcgaagcggttaagggagggttgtgagtgataggtggatattgtatttattggtagattagttgattttggtgttttttggagttttttaatttttttatttagaaaaagaggaattaatagttttatttttaaattgggtgggagtattatattcgaaattgaagtaaagttggtcgtgttataggttcggtagatgttagttgtgtaggtaatttagtgattatttgaagtaggttgtgcggcggtatttttattttgtagatgtagtttagagaggttagggtattaattttgggttatatagcgatagtttaggttatagagagtagtgttggatgggagggtgttggtagttttaggtataggttgggagggttgtggggttagtagagggagggtatattttttagttggtggggtttttttgtgttttagtatttatgtgggtttaaaggagttggaaggagggaggttagagttatttatgggtttagaagttgataagtaggttattgattttgaatttgttttatcgtatgtaaattggggataaatttggggatttaatgatataatgtaagaagtagatatgttatagttttggttatatagttagtgtataataagtggtaagtcgttagaggaggtagtcggtgagaatgggagtattttagtagtttttcgttttttgtttttggttgtagatgtatttgtttttggttatttgtgttttagtttcgtgtttttcggtgtgtgtgaggttaagtttttggggtggggatttgggggtgtgtttgtagtttttgaggttaagattaaggttgaggtcgaggttgaggttgaggttattttggtgaggaggaaattgtaggtggagaagttcgttgatcgtgattttgatttgatcgtaattttgatggtgtcgatgtcgttagtacgtaggttttttgttttcgttacgattggtttttgtagtttatttggttgagaggtgtgttggttttcgtaggttgtaaaatggggatattatcgttcgtttgggttatagcgtgttcgtcgattgtatttggggagggattgagggttgattgtgttgtggggatgttggtagagaattagagagggtatttaaaaaggttaatagttcggtggggagaggaggcgtaaggttggtttttgttttttgggttttgatcgaaagggaataggggatatatttggggatagttttttttttggaggaagaagggtttagggtgttggtgtggagtttgtatagatggggataatgagttggagggtgttgggtaggagttggttagtaataggttgacgagggaggttttgttggttgggtttggtttttaagtgagtattttgagttgcggggatttagggggttttagagattttagagttgagattcgggattatagaggggtgggttgtgtttagggtaatatagcggatggggtagatgttgcgaaatttgtttttttgttttttttttttttgttatagaattggatttttttagtttatggttgttaaattttttagatgtttttgggttttatgggcgttttatattggtttttttgtaggatagtagattttgggggttggttttgatggtatttattatggggtattttatgtaagtatagtgtttttacgtttagttttttagtttgtggagtaggtttgtgtttggttagttttattttgtggttagaggagggagatagtggttttggagataggagttggtttggggttgtttttttagtttttgtttttttagtttatttttttgttttgcgggtgttggttatttttttttcgttagttttatttttagttttttttgttcgagtcgtgatttgttagtagggggtagtggaggttttgaaagtttttggagaggattttgaagtagtttttataaatttgtttttggaaagttttttttgttatatttttagcggtttttttttttttaatattttttttggggttgttatgtagcggggggtggaggaatttattaggtcgtggatagagtagagttatgttgatataaattttggttgaatttatatgttttttatagttagcggtcgattattggaattagggaagtgattttatagtaagggttcgtagagtagttattacgtattttcgattttggtttttggatttagttttggaaaagaagttagattttagttatttggagttgtttagggaagattttagtttggtgtcggttgatagtttattggaattttttatttgtttggttaggtgatgttaaggggtagaggttagaagtgttaagaagtaggtcgagggtggtggtttacgtatgtaattttaatattttgggaggttaaggcgggtgaattttttaaggttaggagtttaagattaggttggttaatatggcgaaattttatttttattgaaaatataaaaattagttaggtatggtggtgtacgtttgtaattttagttattttggaggttgaggtaggagaattttttgaattcgggaggtagaggttgtagtgagtcgagattgtgttattgtattttagtttgggtaatagagtaatatttcgtattaaaaaaaaaaaaaagaagaagaataagaagtgttaagaagtatttgtttttttgattgaaaagtaatttttgttgggcgtggtggtttacgtttgtaattttagttttgggaggttgcggtgggagagtcgtttgaggttaggcgttcgagattagtttgggtaatagaggtgttaggggtagtggcgtttgtttgtagttttagttttttaggaggtttaggtaggaggattgtttgagttaggagtttgaggttgtagtgagttatgattatattattgtattttagtttttgggtgataggatgagattttgttttaaaaaataaaatataaataaaaaattaacgtttattttttgtgattttaaaaattatatttatttgtgataaaataattaaattagaaaatgtaaaggaaatgattaataataattgcgttttttagataaatattgttaatatgtttacgtttttttttagtttttttttatatagatatttaatatttattaatttgttttgaattaaagatggttttttttgttttgtatgagaattattttagttaggtacggtggtttacgtttataattttagaaagttgaggtaggtagattgtttgagtttacgagtttgagattagtttgggtaatatggcgaaattttatttttataaaaaaatataaaaattagtttggtgtggtggtatatgtttgtgtttttagttttttaggaggttgaggtaggagaatagtttgagttcgggaggtagaggttgtagtgagttaagatcgtgttattgtattttagtttaggtaacgggagtgaaatgttgttttaaaaaaaaaaaaaaaaaaaaaaaagttgttacgttgttattttttttagggatttttattttttttatttttcgtttaagatttgttttgtaaaaggatgaggttaaatagttatgggagggtggtattggatgtttaaaaaaatgtttcgtggttggcgggatttagaaataggttggggaggttttagtagagggtggattttagttgggggtggggggtagtaggggggttttttatatgttttttttgcgtgttttatggggttgtttgtgaggtcgtgtgaattagagttcggttgggaagttatatgttatttggattttgattttttttggtagtatgattttagttaatacgtttaattatgtttttttttgtaaaatgggttaatagaaatgtttattcgagatatgatgagaaataaaggtgtttatagagtaaagtgtttagaacggttttggtatgataggagtttatatgttagtgttgtcgttggtatcgttattattacggcggtattggttgttttgttttttttttgtttttgttattttttttttttagtaggtttttatttatttgtttatttatttatggtcgaggtttcgtttgtgttaggtttggtgttgagaacgggggtagagagatgggggttgtgttttgttttttgatttaagggttttttttgtaatgtgaagtttttggagattggatttttaggttgttttattagtttttttttaggttagtttaattttttcgtgttcgttttttgagttgttagaggaagagagcgggaggaaggatggagtggggtttttgtggggattgagcggggggtgtgtgaggttttggaaatggtgtttgcggtatttacgtagtattagtttttgttgtagttgttgtttggagaatatttttggattttaggatattgatgatagaaggtggaacgttttttttggaagttattaagaggggattatcgcggcggttgagtagagttgttgatttgtgagttgtggtttgattatagttattgtttttatgagcgaggttttttgtggttttttttttaggaatttttggttttttggtaggggatagtttagggttgggggtgggtagtggtgtttgtaggtttttttggagttagagaattttttgtcgtcgtggcggggttgtttttttttgttttttttttttcgttgtgtttttagttgtttcgataggatgtttttggtttgagagatagaaattttaattttgaatggttttagtttttaagagaatttggagtttttttgtgtaaaatgagatgttttgagtatcgaggatgttgtgggggattttttattttattatttttagtcgtggtgtttttttcggttataggatgttgtagttacgttgtagggaaggagagtttttttttttgtgagtttagggagtttttttatgtagtttttttattggttattgtttgagattcgatttggtggtttttgttttaaggagtagaaagggggttcgttaggttagggtggggttgggtgcgaggatttttttcggttaatagggtttgtttaggtgttcgttttgttggggtagtagggaagggatttatatgtggtattgggatacggagaggtttttgtgtttgtgacggttaaaagggatggcgttttagttacgtttttatttatttcgaggtttagtatggttatgtcggaaatagtagtatcgttttttttattgttttggtttgtttttaataggttagaggggtggggttggagcgggcgtttgatttgtggttggatttagttgttcgtggataggttgtgagtgaatttgtagaggaagggagatgggaatgtcgggatttttttttgtatttttcgaattttcgttttttgtgagttagatggggagtgtatttttgttttttttttttgggtattttttgcgtttttcgttttaggtatttgatgttgtttgtttattttttttttttgtttttttcgttggttttttttatatggttttaattaggatttttcgttcgttggtggatgggtagagaggggagtttgttgtggggtttttttcgatcgggggattttttagtatagagttttttggtttttgtagggacgttgtgtgtgtttgtgtgagtttggcgtgttagaagcgttaagttgtagttgttttgtgcgttttttatattttttattttttaaaggttttgggtttggtgtttgtgggttggggatttgtgttggggtttttaggaggtttttggtgggagaggtagggtttttttttttttaatttgggtaattttgttttggtttgttgtttgcggaaagtgttttaggatacggtggtaggattggttggggttttggttttaggtttagttttagtttttgttagatttattttttttgtgttttcgtttattttgtttattcgtagggtttgtaggagtattttgagagttggtagggtggtttgttcggcgttcgtatagggtttgttggtgggtggttgaggttgcggtgaggtttttatggttttttcgttttgtatattttttttttgttgtgttgtttcgttagtatatgagttcgtattgtttttgagtttgtagtttgttttttttattaggtggttaagtagggtggtagttagggtggtagagttttattggtttgtaggggattttttgtgggttgtaggtagttttttgtggttgaaggtgttttggtaggatttgtattatgattttcgttaaagtttacgtttaaggtatttgtgggtattttcgttttagacgtgagggttggtatttttttttgtacgtgaagtaaaggtttgtttgaaggagcgtgtggaagtttgggtgtgatgaaggtaaggatcggtggtttattttttttgtatttggattttgggtggtaggtttggggtttttagtttttaatttaggagggtagttagtcgttggaattaagagtgaattttagttgttgttgttatagttggagggaagaggggaaaggaggcgttgtaggggagtagagattttattttttttttgtcgatattaggttgtcggtgttggacggggttttggtaatcgtggtaggagtggtgatgttcgatgatggtaataagggttttttgaggatttcgagttgttttaagggttttttatttggagtaagtattttttttaatttttttaataatattgtgaaattgattttgttgttatttttattttatcgatgaggaatttatagtttagagatgttaagtaatttgtttaagtttttttttgagtatggtagagggagggttcgaatgcggaaagtttggttttagtgtttttatttttaattattgttatttattttttcggttagttttttgattgtaaaatttgaggtttagaggagtgtagtgatttggttagtttcgtacggtaggttagtggtagagttgagtagtgttttttatgttttgattttgtggttttttgaggtggtttatttttaaatacgttttttatggtggttttgttttttttttttttttgaatttgttagtttgtgtttaggtagggggagaagtagagtaattatgtcgggcgggtcgtcgtgttttagtgtcgtttgttttatatttgattggtagtagagtggtttttttttggtgtggtttggaggtgttagtggttatttattagtatagtttagttttatatatgttatttttaaaggatgttgatatagaatgaagtagttaggggaggcggacgttttggtacgagggtggcgtttttggtaattcgtagtgttgttgtttgtggttgtttttggttggtattttatttttttttggttgttttgtagttatttgagggaggttagtatgtcgtttttattttaggatagtgtgaatgtagtagcgtaagtttgttagcgtcgtattgcgggatttggaggtttttgtttttgagttttgtttttgtgtaatttttaaagtacggattttttaggggtttttatttttttatttggaaaaattttatatcgtttagggtttgaggtagggttagagtatggagacgttgttggaggattaagggagaattgagcgcgtgtttttttggttttagtttcgtgtgtgtgtttatgtatgggtattttgttatttatattggtttttacggttgggtgggagttgagttgagttcggcggttgtttttttattttgcgggtttggttggggagtgtgaggatgtttgttggaagttaacgtgtacgaaagagttaatggtggattttatttttttagttttttttttagtttttttagggaaagggtaggaatagagaggttttatttttagaggaaggggtgggcggggatatagcgttgttcggtatagttttttttgagttattttgtatgttttattttatcgatttttgtagtttagttgtttagagcggatttagaaggtggagagagggtttttaataagtagaggatggagtgaatgtgagatttattattgggatttggtaaagtaaagagttttatttttttttcgtagatgggacgggggcggggttggagttagcggggtgggggtatttagtaagagtttttttttatttttttattttttttgttatgggtttttttttttacgtagatttttagtttggaatgattagtgtttagtttttttcgttttttttttgtttcgttggagggagtgatttggtttttggtttcggttatttatattttttgttttgttgtattagtttcgtggtaggggttgcggcggaggtgggtaaaagtcgttttcgggtagttagtttttattttgggagtgattgaaagtttttgggggtttttgtagggtgagttgtttattttggttttggtaaggatatttaggagagggttagggtgtttgtatttggggtatagtataaagaatagtcgtaagtgttttttaggtaggagggtgtcgaagtattgggaagttgggatttagaagtattgtttggggtggtgagtggaagatgtaggatatagatttacgcgattgtgtagattatttggttttattttttcggtttatagtggaggaaattagaggtcgagagaggtgaagtgagttttttggggttatatagtttagttaggtttagggcgtcgattttttgttttgttttttcgtgtttattcggttggtattagtatttttgttttgatattttcgtgtggtagttgttgtgattttgtgatttttttttattttattttagtggggttttgcgagggaaagaagaatgttttatgtagaagtggttggaaagtaagaagtttggagagaagtgaggtttttgtggtttggtttgagtttaggatttatggtttggtttttagggatggagtatcgattttttttttttatatttttattttacgtttttaggagttttttatggggaagtcggaatggatttgggtttagagattgtaaatttattttgttggatgtgtggttgtttttatgtaattaatttttttacggagaagttaggggatggtttttagtattttcgggggttttttagtgaggtgggaggatttcgagaggttaggaggttgtttaagattttttgttttttagggattaggtgagggtttgtcgattgttttgattttttgatgtttttggtggggagattttagaggggtttgtcgttattatcgttagtggttttggtttgtttagttatttttttggggtggttaaattttatgttgtaaaagtttaagtgaattttagtagtggtttgggagaattatttgttacgagttaaggatggagtttttggggaggattttttgttgttttttaatttttttcgggtatatttttttgtagttttattttttgtaagaaagttaggtgtttttcgaagtttttttttggttttaggttagaggtgatagtgggggttttttgtttgcgttggtgattgtggttggttgttggtgtttggttttgttttgtattgtgtatttattgaaggcggtattattcgggttttttcggtggttatgtatgggtgagtagtttacgatatatttgtttttagtatcgtgtgggtcggggtttttagaggggttgagggtttggatggttttgtaggggggtgtttttggttttgtgatcgaaaggagttgaaggtttggagaagtcgttgggtcgaggttagtttttatagatttggcgaggagggaatagatgtttacggagttgttttaggtattgtatatattgttttattttgcgttgatagttaagaggttggtttttcgtcgatttttattttatagataatgtgtttttttagttttttagtggtggagttaggattcgaatttacgtaggtagttttttgggtttgtagttttattttttatttttttttaggatttatgttttggggttggtaggataatgatttttagagttgagtatattttaatttttagtatttgggattacgttaggtgatatggtagggttagttaaggttattaattagttggttttaaaatagggagatgattttggatgatttatacgggttcgttgttattataagagtttttaaaagcgtaatagattatttgaggggtgtagtgggagaggtttggaaggaggaaggaggttataagttaagaaatgtaggtgaatagaaaatgtaggaaaacgtagttttttttgtagtttcgggagggtgcgtagttttgtggatattttttttgtagtttagtgaggtggagtgtgggattaatttgtgttgtttgatattataagtgtgtggttatttgttatagtagtgatgggaattgaatgttattaggtagtagtgtttttatttcggaagaattaggataaatttttttgtggattttaagttttgggagattttgggtttttttggattgttttagttttgtaattataggaaaggttttttatgtttgtttgggagaagaaaatttcgtagtaaatttatttttttttttgataaatgaaggcgagggtgtgggttggatatatgttttttttttgtggattttttttgttttaatatttagaattttgtagttgaaggagattttggggggttgtttgtttgatttgtaagtgaagaaatggaggtttagggaagttaagtgattggtttagggttatgtagagttatgttggaatattaagttagatagtttagtttttgttttaaagtgtttttttttttggttggggaggagggttggagggagtggatttcgagtaatagtagtattggtaggggttggaagagtagttattgtatttaggtgttggagtttttggttattttttgtaggaattaggtgatttattatggtataggtttttttttgtttatttgtagttttgggggttttagggattagaggatattttggtttgagggttggggtttgagagaagagatggaagtatttttagtttggtttgttttcgtggcgttttgtaggtatattcggtagtttaggggttttagagaatttggttggtgggcgtttttattttgtcgtagttgtattttgtggttagtagtttgtaggatttgggttgttgtttgtggttttgaaatagttattttttgagttgagtggggattaggtgagtagatttttatattttaattgttgtgatttttttgttttggaggttggtgggtagtttggttggtgttttatggtattttatgatcggttttgttattaggttcgtgagttgttttttttttttcgggtattttgaacggtttttttgagagtttcgttttgggttttcgtttttgtaggttttcgttgtttggggcgttttttttttttggaagttgggtttttttggggatttattaagaagggttttgtcgagtgttgttaaattgttttatttggtttttatttgttttatttattattttattttaatttttatgttttttttttggttttaagatttgagtaggtagggtttgtgaggtattttaggttttttgatgttgttagtatttaggggattgttagtatatatgtagggagggaaggaatgaaggaagagatgatttggggagttttttagtttttatttgtaattggtatattgcgataaaatatttatggtattttattttttttatatattttttttttaaatttatttttatttgagatggagtttcgtttcgttatttaggttggagtgtagtagtataattttggtttattgtaatttttatttttcgggtttaagcgagttttttgttttagttttttaagtagttgggattataggcgtttattattacgttcggcgaatttttgtatttttagtagagatggggttttattaagttggttaggttggtttcgaattttcgattttaggtgattcgtttgttttcgttttttaaagtgttgggattataggcgtgagttattgtatttggttttcgtatatttataaaagagaatttgtttagaaaattttttagatgtatttttagggttttaaggtatagatatatgaagtttgttagtgagtagttgttgtttattttttttttttttttaatttagagcggtttgcgttttaagcggatagttgtttttttttttttggttttttgttgtttacgtttttatagaagtagggagaagaggtaggaaggtgacgcgtgattattcgttgggcgttcgtatagtgtcgtttgtataggtgttattttttttatttgttatttttttcgttgagtttttttttttttttgtagatgagagagtattgttttttagaggttaagaaatgggtttagagttatttagttgattagcgtgtagttagatttgaattatattttgttgatttttatgtttgtaggtttggtttgatgagatggatagttgggtggtggagattttgagattttggatggtttttaaatagggtttgtagtttttggatagggagagtttggtataaagggtttgtggagtgagttgggggagaaggtggtttagggtttttgtttttgaataaatagatggaggggttattttagcgtttttttagtttttggtgtgttgggtttttggttttgggaggagagaatggagttggtttttattttgggttgggttggtttgggtttaatttagataagttttttagtttgttatgagtgatatttttgtttgttttggtgtttttgttaaaaatatgaagggttttagaatttttatttcggtttgttttttttttagatttggagtgggtttggggttgataatagttttatgttagatagtttgagtagttattagtgttattaggtttgatattgcggtttttgtttcggagggaaaaataaggttttttttgggggattttttgttagtttgtgaaaataggtttggagttagttagcgtttttatgtttagatatttcgtgtggtttttaaagtgtttttatgttgttagtttatatgattttttttaaaattttataagggagggtaggaagtttgagtaatagtttgttaagtatttatatagtaggtggttttattgttttttatttatagataagtaaattgagttttagggtggttatcgtttgttttttaagttatttagttatttagttacggaagaggttatgattttttatattttagtgaagttgaagattttttttttcgtttttaaaaatgtttattttttagggtagtgaatatttggtgtttttgtttagcgtaagaggtgaacgtttgttattttcgtttttttttttttattagatttgattttttttttgtgacgggaatattttgtaggtagtttgttttgtttttatagattttgagaaacggggtttaaattgtcggttgtgggtgggataggcgatattgtagtgaagaggtggagtatttttgtagcggggaagaaatatattttttttatttttttaggtttagtgtttgggggtttgtgaattaaatttatttaagataaattaatgagagaaaagatagatttaattatatacgtatgggattttattgaaaaacgtgatttaaaagagtaggtagaaggtggggttcgtgattggttcgaaggtagtgagttattttagttgattgtttatagttagttatagattagattttttgttttattgttttttttttttttatttgttttgttttttttgagttagagttttgtattgttgtttgggttggagtgtaatggtacgatttcggtttattttaattttcgtttttcgggtttaagcgatttttttgttttagtttttcgagtagttaggattataggtatttattattacgtttggttaattttttgtatttttagtagagatagggttttattatgttggttaggttggttttaaatttttgatttcgtgatttgtttatttcggttttttaaagtggtgggattataggtatgagttattgtatttagttaattagttttaaaaaaaaaaaaaaaaaaaaaagaatttagggttcgtatattattttaataggaaaaaaggaaggggtgaaagtatatattatgggtcgggtgcgatggtttacgtttgtaatttcggtatttcgggaggtcgaggtaggtggattatttgaggtcgggaatttaagattagtttggttaatatggtgaaatttcgtttttattaaaaatataaaaattagtcgggtatggtggtgtatatttgtaattttagttatttgggaagttgaggtaggagaattgtttgaatttacgaggcggaggttgtagtgagttgagattatattattgtattttagtttgggtaatagagtgagattgtgttttaaaaaaataaataaaaaaaaaaaagtatatattatggtaaaataaatgagtttttggaaagataaataggtttttaggagttgagatgggagatgtgaagttttgtgataatgtttttttaggtgtggtgtggaaattatttatattttttagggaagagttagttgtttttagggagtagatttgggtttgtatattattttaataggggaaatggaaggggtaaaagtatatattatgggttgggtgtaatgtgtttagtgtaggaggtagacgtggtttatggttgttgttgaaattagtgtagggttcgattgttttgtattgagtgttgaggattttggttttgtattagttatgagtttgtagttttgggatatatttgatgttggtttaaggggaaatgaggttggaggggtagggtggttggattggatgtgggtttggggttattgttgatttataaagtggttattatacgggaataatagagttggttatagattataattagtaatattatttaaaagtaaggttatatttttaataataagttatattttaagttattattaatttataaaatatattgttggtataatgatagttttttaagaaggatataaaaaggtatgttgggttgggtgtagtgatttacgtttataattttagtattttgagaggttgaggtcggcggattattttaagttaggagtttgagattagtttggttaatatggtgaaattttgtttttgttaaaaatataaaaaaaaattagtttggcgtggcggcgtatgtttgtaattttagttacgggggaggttgtggtagaagaattatttaaaatttgggaggtggaggttgtagtgagttgagatcgcgttattatattttagtttgggtaatagagttagatttcgttttaaaaaaaaagaaaaaaaagaaaaaaagtaaaaaggtatgttgaaggtatttgtttgtggaaagttgtaatttgacgggaggtagggcgagtattttttagaaaggtggaaatgggtttttttgttatagagatttataaatatagattgaggtttgtagtttaggagatttaaaagaggtaaaggtgaataagagttaaggtttttaagttagggtttgattttgggggtgggggttatatatgatggaggatgttaggagggttttttggaggtggtgatatttattaggggggattttaggtggggtttgcgagatagtaggatttggttgaagagcgtaggttttttagataggagtgggaatttaggtttgaaaatgagttggttagattgtaggggttttcgaatgtaagggaagaattttaattttaatagaggagtttgggaagttgtttgggaaaaggagtgataaagcgggaggggttttttagtagagttttgtatgggtaggagggagcgagatgggaggtgggtgttggtaagggatgattttagtggtttaggggagtagttatagggtggaaattaattttgtggggtttgggtaggaagggattgatttgagatatcgggaagaaatagttagtaggattttggtgagagggttgggggtcggggaggggggtgtggagagtgggagtttgagtttttgaaaatagatagtgttttaagggggagatttgaggtaagatgtggagaggtagttgagttgggaagttggaacggaggtgtggttattttaggagattaagttagggggcgaggggatttttgggagttatttagattttagtattagggaatacggaggggagaaggaggggagaagaattagttggtgcgtgttaggtattgttttcgaggttagatggggtggggttggatattggttatgaggatttttttaagagttgggttaatagtgagacgggcggatattagatggttcgggttaagaagtaagtgggcggtgggaagttagaagtcgtggtgtagatttattttgagaggttgggttgtttagatagggagaaagtttatagtttgaggaggtagataggttaaaggaagagggtttgtttgtttttgagattggggtattttgaacgtttttttaggttaagtgagaagaaattagaagaggaatatgttatttaaatgtgttgaaatagtttagtagttgcgttgttttatagaaaatgtgtagaggtttttttgttttattatgtttgtttggggacggtttttattcgggttatttagggtttttttagtttgttaatttaagggtggtaggagttgtgggtgtttttagtttttttttaaggttggtttgtgggtagaaatgtgggttgtttcggggcgttatagttataaatgtatattagtttttagaattatatttttgttttttagttttttttttcgtatttttatgtagaagcgcggtcgttagtttataaaggatagggagggatattgtttttggtatttgatgggaagtatttgttgtattttattggggtgttgtttaggatggattggaaaagagttggtaggaaggttgagttttgtgtttataatttggtttggtggtggtcgaggagtttggtaggagtagagtgtaggatttgggaattgggggttggtgtatgtgtgtacgtacgtgtgtgtgtgtgtgcgtgcgtgttgggtgggtagggaggaagttgtgaaattatatttttttttttttgttgttgtgttgttgtgtgttttagtagtacgtgggtgttattatattttttagtaggtgttaatttttaagattgttttgggttttttttttagttggttgagttggaggtgggagttttaattgttttttgtggtttttagagtgggattttgttgtgggataggttggttaatggtgtttttttttttgtgatttttttgttgggtgggttacgaggaaggattgtgggtgttgtttatagataggtggatatgtggtaaggatattttgggattttttttttgacgttttttgaagggggtatttttttagttttgagatgagtttttgtggatgtgggaagtttattattttaagagtagtagttttggaaaatttaatatagaatttcgagtaggggcgggaaggggttttgtttcgtttattggttgtttggtagagttttgtataaggaagcgtttgtgttgttgtgggcggaggaatggattgagggttatattcgttttttgttgtcgttgtaattgtttattataaatttagtggtttaaagtaatagaggtttttttttttatagtgttaagggttagaagtcgattagttttatcggattaaagttaaggtgttggtagaatttatttttgttttttttagttttgggtgggaggttttgttggagttttttggtttgcggttgtatttttttagtttttgtttttatttttttatagttttttttttttttgtagttagatttttttttgttttttttttttttttttttgagacggagttatttaggttggagtgtagtggtataattttggtttattgtagttttcgttttttgggtttaagcgatttttttgttttagtttttcgagtagttgggattataggtatgtgttattatatttggttaatttttgtatttttagtagagatagggttttgttatgttggttaggttggttttgaatttttgattttaggtgatttgtttgttttagttttttaaagtgttgggattgtagttatgagttattatatttggtttgttttttttttaaaggacgtttgtgatttggggtttatttgggtaatttttttattttaatatttttagttatatttatagagtttttgttgttatatgaggtaatatagtttgggaagggagagttatttagtttattttaggggtttgtggtgtattttagggtttttttgattttaagatataaagtaagaaaataaattggtttaaggggaaaaaaggatacgttgaattttgttgttttaaatgtatatttttttattgtgttaaaatgtatagaatataaaatttgttattagtaatattgagtatatttatagtgtcgtgtaattattagtattgtttagcgttagaatttttttattattttaaagggaaatttcgtatttatgaaggatttattttttattcgttttttttagtttttggtagttattagaatgttttttgtttttataaatttatttttaataagtgtaattttgtgtgattttaaaataaataaatatgagtacgatgagttgtttattggaaggatatttatgcggggaggtcggcgtgtggagtgcgtaggttttcggacgggtaggagttgaaggggcgtggatgtgtcgtttttttttttttttgttttttttttggggttattgtttgagtatttttttttgtaaatggttttaaataatgttttagtttttacgtttgtatcgttttttagttttaggattttttattaaaaaatattttaagttttagatttatttttgggaaaattttaatggttttatttttttttttgagttagttagattttatggtttgtggcgggttgtttttgagttttgagtatttgtgagttagggaagtaggataggtatatttagggaaggggaagagtcgtcgttagttatagtaattgatatttttggaatcgtttaagagatatttagcgtgtgtttaaaatatttatttttttttttgtttgttttttgagacgaagtttcgttttgtcgtttaggttggagtgtagtggcgtgattttagtttatcgtaatttttttttttcgggtttaagcgatttttttgttttaattttttgagtggttgggattataggtatatattattacgtttggcgaatttttgtatttttagtagtgattgggttttattatgttggttaggttggttttgaatttttgattttaggtaatgtgttcgttttggttttttaaagtgttgggatgataggtgtgagttaatatatttggttatatttattttttaggagaagttttgtattttttgaaagtgaaatgtttttaggcgggtgatattgatggtgggatttgtggttttattagtgttttatgagagatgtcgttgtgtgttttattaagttgtattttattgttttttaaatgtggtttgtagatatggtgtcgagaatgatttgggaggtttaaattataatatggtttaaattaatagttttttgatgatttggtattattttaggattaaattgagattattcgaggatgggcgtggtggtttacgcgtgtaattttagtattttaggaggttgaggcgggcggattaattgaggtttgtagtttgagattagtttggttaatatggtgaaattttatttttattaaaaatataaaaagtagtcgtcggatatggtggtgtacgtttgtagttttagttatttgggaggttgaggcgggagaattgtttgaatttaggagacggaggttgtagtgagttaagattacgttattgcgttttagtttgggtgatagagtaagattttgtttttcggtaattaaaaaaaaaaaaaaaaattgagatttttcgagttgtattgtttagtatgatagttattggttgtacggggttatttgaatatttgaaatgtggtgattttaagtggagaggtgtcgtgtgtgtgaagtgtattttgggttttagagttttagtaagggggaaagaaaagaatattaaatatttgttatttttatattgattatatgttgaattgataatattttgggttttgttaagtgaatgatattaaaattaatattatttgtttttatattttttaatgattttttttttttttttttttttttttttttttaaatatggggttttatattgttgtttaggttggagtgtagtggtacgatttcggtttattgtaatttttgttttttaggtttgagcgatttttttgttttagttttttaagtagttgggattataggtggttgttattatgtttggttaatttttgtatttttagtagagatagggttttgttatgttggttaggttggttttgaatttttgattttaggtgatttgtttattttagttttttaaagtgttggtatgataggcgtgagttattgtgtttggtttgtttttatattttttattgtaggtgttggaaaatgtaaggttgcgtttgtggtttatgtgtcgtttttgttggagggttggatcgagggttagtcgagaaggttttggggttgttttatttgaatgttgagtgtgtgttgagcggtagagaattttgagaagtgttgaaggatagaggttttgtgtgggggatgtagttttaggtcggagatgttttttttgtgttttggagatttttatttggtgatagtaagaggaattattgtaagaggggcggttattttagtaaagtatttaggatgttggttttttagtttaggaatttagaggtagaggaggggaggaggttgggtttggaggagagtagggttttgggttttgggaaaagtttggggggttagaaagttgggggatagattgaggttagaggtaaagagaagaaggttcggagaggagggttaaggaagaagggttttgtttacggggagggagaggtttacggggtaggggcgtggtgggagttgtattttcgaggttttttgttgattttgatatttggttagaaaggagttttttttggtattttttgttagcggtttttggagttgttttttaggggttagtgatgagggtgttttgggttgggttgtagatagtggaaaagataggttttttttatttttagtgttggggaaattagttttttggaggaagggggagttgtattttttgagtggtcgtattttttggtttagacgtgtgtgttttgttgtaattttggcgattggtgttggtggtgtttattttatggatggggaaggttaaattttatagatattgagtgataggtttagggttttggattttagtgtttgatttagaatttaggtttttgatttgttattagttttttttttatttagatgggaatagggatttcgggtatgtagtttttttttagatattttttcggttttggtttggcgttcggagattagtagtagtagttttttacggtcgtttattgtgagggtggggagggtcgtgggattaggaggttttagggggaaagttggttatgaggagtgggaagcgacgggttagatgttagtgattgttggttggggagtcgttggacgtggttggtttgtttggttagtgtggcgggtgtttcggggttttagttatttttagttacgtgtgggggtgcgggatgggaaaggtaagagtgtgtggagtttagttagtatttaatatgaggtttcgtgggggttgtttgagggcgtagtttttagaatttagtttttggtttttagaaggtgttattaaaggtttttttttatttgagtgaattttttttagtttttagtaagttttcggaacgagtttatttttaggcgtttttttttagtgtgggagtggttacgtttttgttgggagtgatttatttgggtttagaggtcgtggtattgagatgggtttggtagattttagcgtttaggtttagtttttatagtgttagtttttttttttggggatttttttgtttgtgtttttttgggttttagtatattttaggtttgtagggagggggagaggaagagattgatttattggttaggttttttaggggttggagaggttggagaggtaggagttggattagatttgaatttagaggttttcggaggaagagtttagggtgagttgcgtttttattttttgtttttttttttttgtttttttttttttttatggttttagttagtaagtatttggggtagaggggataaatttaggtggttgtgttttagttttggttgtaggtttgaatggttttttggggtggttggttatgttttttgagagtttagttgtggcgatgtttgagtaggtaggtgggggagtatttaggaagtaggggtgttaggtagagtataaggagagagggtgtttaggttagttttaggatttggttgagaggagggggttttttacgggtatcgtttttggtaagtatagggataagggtaaggacggtatggttagaggtttttgggagttttttttttttttttttttttagtagtttttttttattttttttagggattttgttatttttttttagcgtgtggtagttttttggcgtttttttcgtgtttttaggttgtttttgcgtcgggtttgtcgttgggcgtttttatttttgtttgttttttttttttgtttttttcgttttgtttttttggagtaattttttatcgagtttttttttttaggtagtcgaggtttttttttatttttgtttcgcgttttgggaggttttttgtttcgcgattataaagtttttttgattttttgttcggttttgagttatgtgattcggtgggcgggtcgcggttttcggcgcgtttagcgtagttcgacgtttcgttgttggggtgagttttgtttttttgttttttttagttttgtattattggttcgggggtttttaggtggcgcggtcgcgaggcggattttgatggttatggtggcggtgtcgggagttacgttgtttttgggtttcggttcgaggtcggtaggatcgagcggggtttttaggagaggggtggcggggagttcgatttttacgcggggattagattttcggttttaaaatagaagaatagggttttgtgtggttatagttatttttttgtaaatatttggttaattaagttgagtggttaagtttttttgttgttcggagttttttggaatatgtttttttttcgtaaggggtttttttggtttttaggagggttaggaagaaattcgaattggttatcgttttttttaaaattatttcgtttaagttattatttttttgggttttcgaagatcggttggttggaggttggagatagttttaatgttcgaaatgtcgtaatcgaagtttttcgcggcgtcggtattgggatttagggagttgttgttatagcgtagttttggatttttggatgtgttggatatgtgtagggcgtttttgggaggagcggggagggagggtgttgttggcggggttggtttgcgtgtgttttgtttttttataatggtatgttgcgtgtcggttatgtagaggtatgttagtgagtaggggttgagggatttttttaacggatttgtttttagagggtttttttatgttgggagaattttagagattaaattatgtagttaacggggtggttttcggttttaaagtagggaggggcgaggagttttgtaggtaatgttatttgtttttgaaacgtcgttttagtgattttggggattgatttagtttttagtttgttgtattttatttttggtttttttttttttgtttttttatgtgaaatttgttgtgttttggttagaggtttggggaatagttttttgtttatttaagataagtttgtaattttttttttggagaaaaatatgttattcggaagtaggttgagtagtggttttttggtaggtttgttcggggttgtggagatagtatttgttggattaggatggagttggaatttggtttggattttatatgagaaaattcgttggaagaggaggaagtagaaaaaggttttattttttaataatgttgtgggttttttttttttatttattgttattttgttttgaaatttaatggggttacgtgtgtttttatgaatgttattttttttggttaattttttcggtagttttaggagtttttttttaggaaaaggaagaaggtgtttgtttagtatttagtatacgagtttttgttggaaaggtgggatttttgtttttttttgggttttttttaggttgagatgtggttaaggaaggtttgtggtgtggttcgttttttttaatgttcgtttttggagatttgagttgttgttgatttttagtttgttttttttgttttttggttatttttgtgtcggggtggttgagatattattgtattggttattttgtgtttttattagttttcgtttttgtaggttgttattgtgatggtgatggggttaatttagttgcggtggggaggatttattgtgtgcgtttggggggtggcgtggggtattttgggatgagaagatgcgatttttgttttgagagttttgttttaatggaaggcgggggtatagttgtaggtagaagttattaagtattgtggttagattagtattttatgttaaaaatggttttgttggtcgggcgtagtggtttatgtttgtaattttaatattttaggaggttaaggtaggtagattatttgaggttaagagttcgagattagtttggttaatatggtgaaattttgtttttattaaaaatattggttaattcgggtatggtggcgcgtgtttgtaatggtagttattcgggaggttgagataggagaattatttgaatttgggaggtggaggttgtagtgagttgagattgtgttattgtattttagtttgggtaataagagtgaaattttgttttaaaaaaaaaaaaaaaaagttttatttgggtttgggatttgtttttcgaatattgggtttattgtgttttataaggatttttatttcggaagttttagatttatttgggtaattagagtttttgggttgattattttttagttttggttagttttttgggttatcgtatttttttaattttttgttgtgttacggttggtttaagttgtttttattagataatgcgaggtatttttataggaggggataatttcgtttttaggagttttttttttttgtttttaggtttggtgtagtgtgtggtttttttgtcggtgttaaaggttttaaggtttttttaagaagtttgttattattattagtagttttcgttatttggtttttttgtatatgtaagttttttttatatatttcggatgtttagggttttcgttttttttttttggtcgggagtgtgggaagagggttttattttaatgtttgagagtagggttaatggttagggtaagttgtgggggttttttttcgtcggtttttttttgtagtttttattttaatatagagtatcgatattatttgggttttgggaagatttggaggttgattattttggaggtttttagcgttttatagttattttttggggaagaggttttttgagggatttgtggtttttggttgggattttagttttagagttttgtttttcggcgtcgagttttgatttgtttattgagtgttagttcggttttcggataggtagggatttgttttcggagtttagtagagttttgggaagtttttttaggagggttttcgagggtggcggttatgtttagttcgttgtacgtgtgagtttgtttgatgaggaattggttgggaaggcgcgggtttaattataggtttatgagggtttttttcgtttttatttaggaagtagcggagattttggtatatttagtatttgggtttgtgtttgtttagttgttggtggaattatgggagttttgtttcggggtttgtagagtagtagtgggaattttttttattttagttttttttagagttggttgtttaaattcgtcgtcgtttagtttttttttttttttttttattaattttgggaatcgtatattgtttattttatcgggtttcggagcgggtgtaggaagagagagtttaatatttagaggtttgggttttttgtaggcgtttgagttgttgtggtttgagttgggttttttgttggaattattatagtagatttaatgatttgtttgtaggagttgttttattttagtcgatttcggggttgcgggaaggggttgggttttggttttgttgggggtggggggttagtgtaaagggtttgaaaagtggtagaggtgatggtttatttgttttttttttggtcggtcggtttaaacgcgattggttttttttttttttttttttttttttttttttttttataaataatattaaatgcgatttgttaatgtatttatttgggtttagtagttggattatgggtagaagtattttagatttgttattttttttaagttaagggtggggaatattttttgtgagattttggtttttgagcgtttaagattgtttttggaattttaattttgggtcggttttaggggattgacgttgatggagttgttgatattgattttcggtttttgtatggtttttaggaagggggtttttcgttttttgtttcgtcgagtttggttggtagtattttttttttaggtttgtgttttcggtagggtttgttgttttcgttttgttttgtgggtgttaggttttaagtattaggtgattcggttattgaatggttattgaatagttatttttgttggtgtttttagtggaatgtgtatggacgtttttttttttttagatttttgttttttattttttagtttttgttttaggggttattataggattaggaggtacgtagacgtgggtggtatatttattgggtagatttagttttgaatttgtacgttttttttaagggggtttttagcgggcggggttgatggtgtcgtttttttttttgttattagaacggatatgaggattgtgttttgtcgatttacgttttgagtttttagacgttataggtgtttgtttaacgagtgtttgaatgaatggttagtattgtgtgatcgtagatttttaatttttatttaaatagtttgtggtttttgtgaggttatttcgagatagttttataagaatttttattttttttgtacgtttcgtataaggtttttttggggggttttttagaaaaagggttaaagagtagtattttttcggggatttgaatacgatttttttcggggtaggggattgttttggaagattttcggtatcgttttttatgcgttacgtgattaggagggttttggggtaggatggtgttttttgtgttttgtgtgttggggtcggaggaaatattgttcgtggtcggtgttatttgttagttttgaagattaatgatgggttggatagtggttttattgagtgggagggagaatcgttgttgtttgtagttggggggtcgggtgggtgggagtcgaggttagggagaatagcgtagatttggtacggagaggtttggaggaggagtagggggttttagttatttagggtgtagggacgttatacgaggagtaggtgtggtgtgcgtttttttgcgggttttttattttttggtttcgttatttgtattaggttttgtggtgagagggtatagagtggaggaaggtgtcgtggttagggtaggttatacgttgtgttaatggattgttgttatttgtcgtttttgtggttttgttgttaggattttttagtattaggtttttattattaggtatgggttttataggtattattggtttttcgaagttagggatagattttatagataatattgagtttttgtagttagggatgggtttttacggttagtattagattttagggattagtatcgggtatttatagttagggataggtttttatggttagtattaggttttagggattagtatcgggtatttatagttagggacgggtttttatggttagtattagattttagggattagtatcgggtatttatagttagggacgggtttttatggttagtattaggttttagggattagcgttgggtttttatagttaaggataagtttttacggttaatattagattttagtgattagtattagatgtttatagttagagatgggtttttatggttagtattaggttttagggattagcgttgggattttggatgattgaaggagggtacggttgattaaagttgtaggagttagtttggttattttgaggtattaagttattattgcggttttaggggatttagatttttttatttgtttttttgaattttggaattagatatatttgggtttagtttttgttttcggggttgtgtgtttgggatggttgttttatttttttgaagtttagtgagatggggacggttgtatagggttcggtatagatggtattcgatggtatagggttatttgtttgtatttatatagtttcggttttcgttttggttgcgtatcgagagttttatgtttagatttttgttgagtttttaagtttttggttatgttttaggtttttcgtgagaagtattattgtatggattatgtttcgggattttattttgggttgggaagtttgttttatttttttaagttttttttagaggcgttttatgttttattatttttattgtttgaggggttagataggggaatttagtgtgggaggtttagaggtgtcggagtagacgttaagcgagtttcgtgtttatgcgttgggttttggtagatattttgaatgagttttttttttaggaaggagattggggttttagtttaagttgtggttttaaattttgtgattaagagtggagaaaaggtaagatttttttttttagttttttagaatagtcgatagtggtggaaatatggggtttatattgaatttttttgtaatttgttgaagagaatttagtttatatttttaggggtggaggtttggtcgatttggtagtgtgttcgtttttttggttatagtttattttggatcgggtattttggtgtttttttttagtgacgtagtgaagttattatgacgtgtttagttggtgagaaagtgttttttgtaatgttttattttttttagagggtgaataagttttgtttattataaataattatttatagaatatatgaggtttaatttaattttgggttacggtagcgttttttgggtaaatttacgcgttattttagttagagtttgtgtttttataggttttttggatttattttgaaggggggttggattttttgtttgtttcgatgagagggttgtaggatagtttttagcgagtttttttgagggttgtaatttttttttttggtatttttttgttcgttaggaatgttttaagtttttagtagaagtttatttattatagtcgttttttattttgtttattattttttttgtttttatttatttagtagatttcgtgtatagtttagtgtaggatttagggtgggaaggtgtttcgggtgggttggagtaaggtttttagttagggcggggttttaaggtgggtttatagttaggattgtgatttgggaggtttttttttgttttgttttagtttcggtatcgtcgttgtttttgtgtttagtggagatttattggttttaggttttaaaattttagcgaggtttgtagatagggaggagttttattcgagggtagagtgattgtcgggtttatttgtttgttacgaattacgtggttttagatttgttatttttttttttttagagttatggttttttgtttgaaaaatggataatgatggttattatgttagggattattttgaggataaacggggatgaaattgaagaggtttagtacggaatttggatatagaagtgttaattgtgtgttattagttgcggtggttgttaaggtttaattatatggtagttacgggttgagtggcgggcgggaagtggggagtaggagtatgtaagatgggtatttttgaagtttttgatttagtgagataagtatatatttagttttaagatggagtgttttaggaaggtggagattgtaaaggttttgtggcgtaggagtgtgagttgtatttttgggttttttagaattttattagagtttagggaggaggttagtttagatataggggtaacgggagagatgggagtgagaaaatggtttggcgtttggaagtggagtttggaaaggtgggcgtggggatagaggagggttttgggggttatgggtttatgcgtttaggaggtggaggtagtgaacggggttacggtcggttttatacgtggtattattagttttgttgagtttgtatttgttttttaggttttttgagtgttattattatttggtattttttggtttgatttttgttttttgttcgtttgggaagagtgagattatttgtttaaagttttttagttgtttttaattattttggttgttttttggttttgtttagggttagtcgttgatttgaattgtttggtgttatttttttagatttttggggttttgttttggtattaatagttatttttatttttattatttattcgtatatttatttagtagtgttttttgggtatttatttagtaatattaaggcgttgagatgcggttgtggttaagattcgggttcggtttgtgaggatttcgtagttgttatttttttagagtatagttttagttaggtatattgtggggtttagaaagagaaattaatatattgtgttcgtttattttgagttgttataaggaatagtcgaggttggggggttatttgatttacggttttgtaggttgtataagtggtgttagtatttgtttggtttttggggaggttttaggaagtttttttttatggtagaaggtgaagggggagttggtacgttatatggcgagagagagaatttttagattttttttttttttgaaatggagtttcgttgtgttagttaggttggagtgtagtggtataattttcggtttattgtaattttagttttttgagtagttgggattataggcgtatgttatcgcgttcggttaatttttttgtatttttattagagatggggttttattatgttggtcgggttggttttaaatttttaattttgtgatttatttattttggttttttaaagtgttgggattataggtgtgagttattttatttagtttttttagattttatagtaattagatttttcggattttgtgatcgtggggagggtattaaattatttatgagggatttatttttatgatttaagttttattttttttaggttttatttttaatattagggattatattttagtatgagatttggaggggataacgtttaaattatattatacgtgatttttttgtgcgtgcgttagtttttatatttggttaagtagtagaagttttttttttgttttttgttgagagagcggtgggggagaaatgatttagggatgggaggttggtttttcgaggggttttggtgtttgtggagtgggagtgcgggaaggtttttacgttgtgtgtgtcgtgttgggttggttttttatagtttatcgtggtgtttttcgaggattgttggggaggaaagagttaattaatttggggatttagttgttgaagttattattaaatttgagtagtttaggggtttttttttttttgggttttatgttatttagtatagtggggtttaattgaatttttttttattttttaaggtttttggttggcgtggttggggtttgggatacggggagcgagagggtttgggttttttttagatttggagtgggtttattagaaatggtttaggaaatcgcgggggttatttttagtagttgggggtttttgtggttatttttttttggttttgttgagtagttttggtttttggagtttttagtaagggatgtgggggtttgttaggttagggtttttattgttgtcgttatgtatagttgtattttgtattcggggagtggggtgtcgagtggggtgtttgggaggtaggtttttttttgttttttttgtttagagattttggggatgagttgagtgagattttttcggtttttgattggttgtgtttttgttgttattttttattttttttaagtggaggtttatgatttttttttttatttaaaagggttatttagtgatttagtagattttagtttgtgttatttagggtttttttaaaaatttgtggggaggttgggtttggtggtttatatttttaattttagtattttgggaggttgaggcgggtggattatttgaagttaggagttcgagattagtttggttaatatggagaaattttatttttagtaaaaatataaaaaattggttgggtgtggtggtacgtgtttgtaattttagttattcgggaggttgaggtaggagaattatttaaatttaggaggcggaggttgtagtgagtcgagattatattattgtattttagtttggacgatagagtgagattttgttttaaaaaaataaaaataaataaataaaaataaaaatttatggggggatttttgtgtttattggttggtgtgaggagagggtgaggagttgtagagaaggtattaggttgaggatcgtttttatttttgggttatagaattgaaggaggggatatatgaaagatgtttttagattcgggttggaggttggggatattcgagggtaaggacgacgttgtttttgtttttgtttgtagaggagtgtatagggtttattagttttttgttgttgtttaagtgatagttttatggagatagaatttatatattgtgacgttgatttttttaaaatttatagtttaatggttttgttgtatttataaagtgattgtattagggttatttagagaaatagaattaatagaaggtgtgtacgtgtgtttagataaagagatttattattatgaggagttggtttattttattatagaggttggtaagtgttaagattggtagagtaaattagtaggttggagatacgggagagtttatgttgcggttttggtgtttatttgaaggtttaagatttaggagagttaatggcgtcgttttagtttcgagatttaggaaaagcgtatgtgttagtttgagtttgaagtaggaaaaatttgatgttttaggttgaaggcggttaagcgggaagaatttttttttatttaggttttgtgtttttttatttagatttttaggtttttgttataaaattataaagatttgattagaataaaatttgagaaaaaattttttttttttatcggttttggatttattggttgggattttggaaattagattgatagagattaataggaaataagtataataatttaagtaagttttatttgatatcgagtttttataaggaaatgaagatttagagaaatcgttagtttgagcggtttttgttttgttttgagataaagttttattttgtcgtacgtttaggttggagagtagtggttcgattacggtttattgtagttttgattttttgggtttaagttggggtttagttgtcggtttcgggagttgttttgaatttatttttaagttttagtttagatttttaagtagttgggattataggtatgtgttatttcgtttggttaattttttattttttgtagagatagggttttattatgttgttcgggttggttttaaatttttgggttcgagtaatttttttgttttggttttttaaagtgttggggttataggtgtgagttattgtgttcggtttaggtttgaatagtttttatttgttttgtttgttttttaaatttgtttgttgtttgttttgagtagtttttttgtttattttttttgtttgttttttgtttaggttggagtgtagtggtatgatttttgtttattgtaatttttgttttttgggtttaagttatttttatgttttagttttttaagtagttgcgattataggcgtgtgttattatattcggttgatttttgtatttttagtagggatggggttttattatgttggttaggttgttttttaatttttgattttaagtgatttggttattttggttttttaaagtgttgggattgtaggtgtgagttgttgtgtttagtttaggtttgagcgtttttatgttgggtttgatgaagagtggaaagtcgtgggaaattgtgatagagtaataaaagatgagttgaatagtgagttcgtgggggtttcggtaagatttgtgtattggggttttttttagattttttgtttttggagatgaggttgttttttttcgttgggtgtagggagggtattttttacgtgaggggtttatgatttattttagagaaggggtaggttagtgagttttttttggatttgttattttttaaatttttttagttgaaaatatttattatgttaaggtattgtattttggagtgtgcgttttaagttttgttgtttttaattgatcgggtgaggtttatttttattagagtatatagtttgttttatttaggtttttgattgtattttttttttgtttgtttcgagaatatttattagtagtgtttgtggttgtagcgtttattttaagataaatttgtcgggaagtattttgtttttattattatttttatattattttagtatatcgattttggaaataaaagatattattttgtttatagtattttatttttagtagtggtattttttttaaaaaaaaatggtaatttttagttgggtgtggtggtttatgtttgtaattttagtatttgggaaagttgaggtaggttgattatttgaggttaggagttggagattagtttggttaatatggtgaaattttatttttattaaaaatataaaaattagttaggcgtggtggtaggtatttgtaattttagttatttgggaggtcgaggtcggagaattgtttgaattcgggaggtagaggttgtagtgagtcgagatcgcgttattgtattttagtttggacgatagagtaagattttattttaaaaaataaataaataaataaaatttaaaaaaaaatagtaattttcgatcgttgaaaatgttaaattttagagaatatagtatttttataagtgatgttaatattgtttttgattagttgttggttgaagatttatttgatgaatttgatttttttagaatagacgatttagatgattttgttgttttgtttagaaataattgtaggaataatttaaaaaattttttttttttttaatttttttgttttttgagacggattttttttgttgtttaggttggagtgtagtggtacgatttcggtttattgtaatttttgttttttgggtttaagtgattttttagttttagttttttgagtttagttgggattataaggtgtttgttattatacgtggttaattttttgtatttttagtagagacggtgttttattaggttgattaggttagtttcgaatttttgattttaaataattggtttatgtcggttttttaaagcgttgggattataggcgtgagttattacgtttggttagtttttatatttaatttttatatagagtatttagttagatttgttttagttttaaagagcgtgtttatgtaaaattaagtgagtgttggtagtgagttgaattttttaaaaggtaaaagggttaaatattaaatttatttaaaaatatttttatagatatatttagaataatgtttgatcggttatttaggtgttttatagtttagtttagttgatatagaaatttttttttttttttttgagacggagtttcgttttgtcgtttaggttggagtgtagtggcgcgattttggtttattgtaagtttcgttttttaggtttacgttatttttttgttttagtttttcgagtagttgggattataggtgtttattattatattcggttaatttttttttttgtatttttagtagagatggggttttatcgtggttttaattttttgatttcgtgatttattcgttttagttttttaaagtgttgggattataggtatgagttattgcgttcggttgatataggaaattaattattatagttatatagttatcgttattaattttagtatattttattatttttaaaagagattttgtttttattagttaatttttatttttaatttcgggtttttagtttttagttatcgtttatttgttttcgtttttatgaatttatttgttttagatagtttgtataagtggaatcgtatagtatgtggttttggtgtttggttttttttatttggtagaatatttttaaggtttatttatattgtagtaggtgttggtgttttatttttttttatggtcgaataatattttatcgtggatagattatattgtgtatttttttatttgttgatggatatttgggttgtttttgttttttggtataattttgttgtgaagaattttgtagtgagtgttggtttataggtttttgtgtgaatatgtttttattttttttgggtaattgtaagattatgtggtttagttaattagtttttaagttatgtgtttgttgagggatttaggtttggtgggggtgtattgttgtgtttggttagttaggtgttgcgagttcgtgtcgtagttatttttttgtgttgtgttttgaggttgtttcgtcggtatcgggtattgtgagttttaggaggttaaagttttttttgttttattttgagtttaggtttcgttttatgaattaggatgaatggatattgaattaacgtagggatgggtggggttggggtggggacgtagagtgatttcgggggtttgtagttgggttttggttgttgatttttagttttttttgtttgttggagtttagaataagttagaaaggggaaatgtaaagttcgagtgttttttttgtggtagattggtaggtttgggtgggtgagttatttgtagttagttgtagcgtgagagaggaagtgggaggggagggagagggtgagtttggtgtaatttatttttggaaggaggttgggttgaggttgggggaagtgatttttatttttttgagaggatttttttttggggttaattttaaattaagggagataagatttttttgggggaggttggaagtgttggggtttttaggtgggtaggttttttagggttaacgttttggggaagttataagttattatgtttttggattgttatatatatatatatatatatatatatatatatatatatatatatatatatacgagtaaattgtaatataaatgtgtgtttatgaaagtgtttattttaaattattatatagtttgtaaagcgaaggttttggttcgtatttgggtatttattgtttagttagtcggtaggtagtttgtattgtagtttgttattattttttagagatgtagtcgaggagtttagttggtttggagggtttagtgggcgtagttttaggaaagtggttaggttcgggttaggtttttttttttttttagttttgggagaaattattatatgaatgtagttttttttcggagttcgggttggaagggtttgggaggggataggtttttattttaggagtttttaggtttcggttgttgtttgtgttagttgcgtgagcgtgagcgagttaggggttattattgggtggaaggaagaagcgggtattttttttaggaggttatcgttggagttttatagtaggttaattttaggttttgggttttcgggaggaggagaaagaagagaagtaggaggtgtggagggtaggttaggattagaaggtatatagggtcggggtagtgtgggagattttgggggtttttttatttaattagttaatattatagcgtttataagaatacgttattattgtagttttattattttgttttgattttagaaggtataattgatgattttagggaacggagaatttgaggaaggtttcgtaggagagggttagatgcgatcgagtaaatgtgagtcgtttgtaaattgtagagtgtacgtatagtatcggttagttttggggttagtgtttttttggtgtttagttcggtttttgtattttttagtgttcggttgggttttgtgggggttagggttgggtttggtatattagaggatttttattaagtttttggtagtgttttagttattaaatttagtttgttagttattaaattcgttttgtcggttttcgaattattttttcgttggggtcggttatgttacgttaggttttttatgtaggacggtagatggatagacgttgggattaagttatttttgggtcgcgagacgtttgattttttgttggtgttttagaagatgttagtttttcgtggtatgttttttacgcggtgtttggggattagtggtttttaaggggtttttttgttttagcgtggggagtggtttggttaaggttttagtgtttggttggagttaggtataggtttaggtgtattggttggaggttttttgtttatgggttttgtttgttttgtgtttttggtttttattgtgttttttgtgtttttgggagagattttaggggttttgagtttagtattggggttggggagtgggcggggaagagggtggggattagggtttttggttgtagaatagttaggttttaagtttttattttattttttttttatcgggcgttttattttatattgattattttttgaagaaaattttttgaatcggttttttatttcggttgttttaggaagtttatttattttttcgttttaatgttttgtggttttagaaggatggtggaagtcggaaattatgagttttatttataggcggttatatatcgaagtcgcggagacgtcgtgggaaaggattttggttagcgcggtcggtatagagggagcggtgttatcggggtagacgggaatcgtggttgtttttatgttggtttgggagagacgaggggtcggacgaaaggatagtagattggttatttatttatttatttatttatttatttatagcgttttattgggtgtttcggacgtgtaaggttttgtgggtagtgaatgcgatagattttagatagtaatcggagggttacgtgtgtaagaattgagggatttaggttgggcgtggtgttttaagtttgtaattttagtattttgggaggtagaggcgggcggattacgaggttaggagatcgagattattttggttaatacggtgaaatttcgtttttattaaaaatataaaaaattagtcgggcgtggtggcgggcgtttgtaattttagttatttaggaggttgaggtaggagaatggcgtgaattcgggaggtagagtttgtagtgagtttagatagtgttattgtattttagtttgggcgatagagtgagattttattttaaaaaaaataaaataaaataaaataaaataaaaattgaggaatttagtgtagatgagttatttcgggaaaataagtgggagttttaggaatagtatggggaagggatggtttcggtagggaggatttttgtgggtagttttgttggaagagttgaaaggtagttagagaggttgtgcgtggatggaagttgaagagtaggttaggggcgtgtgttttgttaataaagattttaagtatttattgattaggtataatattatgtgttttataaataaatattttatttgatttttagtatttttatgagatagatgttattattttattttatatgtaagaatattgaggtatagagtggttaagttatttgtttagggttatatagtacgtcggtggtaggtaggattttggagttataggaatttggtatattttaggtgtaatggaaattagttacggttttatagagggaaattattagattagtaaattttatatacgttttttggtgttttgaggaggagggattcggataggggtagttaatggtggtggttgtgagatgtgttgggttaatattgatgagagtttgggatggatgagtggattcggagtaatggaaatggagggtttaggttcggtttttggagatttagttgtaatagttgttggttggagaggttgtttatttagatgggggatggggtgggaggtaggtgagatgagagttttagagtttagtttggggtacggttattgggtttaagatgtttttagatgttggggtttgatagtgatagtggttgtagatatttaggatttagtagagggtttggtatagcggggtttagggatacgtttgtgagttaggttggtatttaagtgtgaatttggataaagaaggtggtattgttggtattgaatgtttaggggttgggtgaagttagttagggagaggggtttttaaggtattaggattgatttcgtgggtgagggcggaggaggagacggtagaggttgagagaatagttagagataggaggaaggttagtagagttatgtatagaagtttggagaagatttgaggaaaggaagggttgggtggtcgttattttttgtagttaggaggtaagggtgatttttgtgtgttttattttttagaggattggtggttttatttggttagaattttaagtttagagatgtatttgagttttatgttatggtgtaggtagtaggagttatggagtaggtttgcggggttacggtttgtttgttgttttttggtgtttttattttgagtttaggggttgtttggatgttttgtgttgtatttttttaggcggtgttttagagaggatgaaagtggttattttaaggtgtgattaggtagcggtttatgtatattgtttttttttggggagagtttgggatggaagggtatgtgtgtgtttttgagattttttgaataggttttatgtatttatttatttattttattatttatttatttatttatttatttatttatttacgtatttatttatttatttatttatttatttatttgttaatttatttatttatttatttatttatttatttatttatttatttatagttatttatttatttatttatttatttatttatttatttatttatttatttatttatttgtttatttatttatttatttatttatttatttatttatttatttatttatttatgtatttatttatttatttatttatttatttatttatttatttatttatttatttatttatttatttatttatttatttatttatttatttatttatttatttatttatttatttatttatttgtttatttatttatttatttatttatttatttatttatttatttatttatttaattatttatttatttatttatttatttattattcgtttatttatttatttatttatttatgtatttatttatttatttatttatttatttatttgtttatttatttatttatttatttatttatttatttatttatttatttatttatttatttatttttttatttatttatttatttatttatttatttatttatttatttatttatttattcgtttatttatttatttacgtatttatttatttatttatttatttatttatttatttatttatttatttgtttatttatttatttatttatttatttatttatttatttatttatttatttatttatttatttatttatttatttatttatttattaatttatttatttatttatttatttatttatttatttatttagttatttatttatttgtttatttattcgttaatttatttatttatttgtttgtttatttatttatttatttatttatttatttgtttatttatttatttatttatttatttatttatatatttatatatttatttatttatttaattatttatttttatttttattttagaaagtatttgaagttgttggggtgtgtatttggaaaatgcgttataagtttttataggtttttttttggtttttttatttttttgattggtttttttttcggatatgtaggattttgagtagtttttttgggaggtgggtgtagtttaggtaggttgtttgtaaagttaggatcgagggagttatatttaaggtattgtgggtttttaaggcgatggtattgtgggtttattgtttttagatttttttaatttttaggtttttgagtaggaggatttttggggtagggtttggagacgggaagagaaaataattttagttttttaatttttgttagtttaggtgggtgttgtatggattgggggtatttggaatagttggtttttttattttttttttttatttttttagtttttttggttataattagatagttgtgtgcgatgttttttttttttttgaaggggttatttagttaggtttttatttatggtttaggaatgtgtttttttttgtttgttttttatttttaagtaggtcgtgtttttagttttttgttgtttttgaagggtttgggtatggggtagtttttgtagtatttttagggttcgagttgatttgtatagtagaagggaattgggggaaagttttttttttatttagtatttggtagggggttattttgttgtattttagagatttttgtttaagttttgttattttagatgattttataagttgggggaggcggagttttagtttttatagtttttgttgttgttttattgttgagttttgttgtgtatttgttgataggtttgttgatagtagaaggggttggagagagggaagttttgggttttgttttttttaatttttgtttaggggatatttttgataagaggaaattttagtttgtgatagatggttagtgtttatttatttacgggggaatttttttttttttttgtaagtttgtagatttgttaggaattaaaggaatttttggttgataggttattgtggatatggttggagggttggtacgggttggattttggggttgttttgaggtaggggtcgtttttgttggaaggttttttggggtggggaaggtattagggttattttttgattttttttttgtagtggatttattttagagtttgagataaggtaagggggtagtagaaaatagaatataaaatagttttttttattatatatcgtattagaagttagaggatttatttttggtttgttttttttgtagtttaagttttgagagtggttttttaggaagtgaatggtgatggtttgtaggttagagtttgttttggtttaagattgatgttttaataggtcgcggagtttgggtgaaaaaatttaggttagggaggtggtgggttgtaaatgaaagaatagaggagggttttttttagaaagcggcgggtggtgtgaggagtttttggattttgtttaaatttgattttatcgattggggttaattgaaatcgtgttggtagaaaggtaaaattgtttgagatttttttttttataatagaggagaggtttgtttgaaagggtttggcgagggaaaagttggaggaattttggtcggtagtaaaagtggggattttcgttttttgtttcgggggcgtttcggtttttgaatgaatgaaagaggaggttggatggagatagatttatattatttgttttttttaggttttgtaaaggagtatatagggtttttgttggtttttttattttgttagttattaagaaggagaaaatattaataggggaattgtaaagttgtagttttgtttaagttttatagtggaaatcggaaagagttttagttcggagaaaaatgtagttttttgtttttgtaaattcgtgtttttttttgggaggttagagttattgtgttcgatttttaagtagggttttagagtgttttaggaggggaaggtagagttttagattttcggtattttaggttttaattaggttttgaggagacgttttttgttttatataaagtgtgaagtgtaatttgatttggagttagttaataaattagatgagttgtgtgtattttaaaaatttagtttttgattttttatttatatatatttgtataatttggttatttatatttagtgtttttatttttagaagagaataggaagtttttagtgatatttatggagtgtttgtagtagtttgggtaggttagtaggaatataatgtagtgaaaagtagagttgagatgggaaaatattttgtttttagagttttttagggatgatattttttatcgtttttgtttattcgttttggagtttatttcgtaaatagtaatttgtttttatttgagagtttttttttgtcggagtttagggatggagagtagttggttttagttttttttttttatttttttgttttttagatttattttttattttgaataattgtttttaatttgtttttttttttttttagttgtagaatttagaattttgtgtgtgtggttaaaagtttagagagtgttgtaggtaatgttgagataattttattaaattttgtaagtttttattatattaagtttgtttgttttttttaatttttattttattttattttattttatagggatggggtttcgttacgttgtttaggttggttttgaatttttgggtttaaacgattttttcgtttcggttttttagagtgttaagttatttttttaattgggatttacgggtttagggattttttgatgaatcgtttaaaatacgtgtgtgtttgtttgtttgtttttaatgtatatttttttagggagagtttttattttttattagaggtttgtggtatatatatgttttgtattattgtattagattgtgaattttttatatgttaaagattgttttaaatttgttcggaagtttcggttaataaatatttaaataaatgaattttaaatttttatgtgttattattgtttttattttgattatttttaagtttgtagtgttatttttttgttattgtgaagtagatatttaataaatatttgttaaatgaattaatgttatggttttggtttattaggattttaggattatcgtttattattattgtttatagtttttttattattttgttttagagtagttttttttttgaggtttgtttatttttgtacgtgtgtttagtttttagttttgtcgttttattatttttttttttttatttgtattttttgaattgttaatagttaataatagtttttttttttatttatttatttatatttgaagtgagaagttattattgaggtttttgtggattttgttagtttaatttggggcggttttttggaggtggagtttttagatgagggatggatattttggtgtttgttgggtagatttatttgggagttttggtaggggttttagggtagttttgtttttttattttggttgtgggatttttggtgtattagggttttttaagtaagtatttgtgttttgggagagttataggtaggtttgagagggtttttggaatttgggatttttagttcggtttagtagttggtattattattttttttgtaagggaagttatggaaattaagatgttaatgtgttttgataggtttggggtggttttaagttttgggaagagttttggtaattttttttggttggcgggtagaatttttttttggtagtttagggttttgtttttagttttttgggggagagtaattgagggaggagttggaggttaaggttttagtgttgagttgtttgtatcgtagttgtattttttgggttttggttgtaggaattttatatttttttagtttttttatggttttcgaagatttggtttggggagggggttagtagtttggggtttatttatttggttttaaattttggttttatcgtttattcgttttgcgatttttataattgataaaagttttttcggtttcggtttttttatttgtgaaatgggataataatagtggttattttataggattgtgtgatgatttattagttataatagtttttgagtagcgtttagagtaatatttggggttcggtgtagtggtttatgtttataattttagtattttgggaggttaaggtgggaggatcgtttgaggttaggagtttgaaattagtttgattaatattagtgagatttattttttaaaaaaaaaaattagagtaacgtttggtatagagagtttttagtaaatttcggttgttgtgatgagttttgtttttttatttgtttatttatttattagattttttgtcggggtttgtcgtgagttttacgttgttttgaagaaagtcgggttggggtgagcgtgatggatgaggtgtttggttttataaattttgtgtgggggggttgtggtgagaggaaatcgtatatattattatttagttattatcgtggggagattgtttggacgtagagagtaggttttgtgtgggagcggggagggtaagttttggttgcgaggtagggtttttttaggatttagtagggatttgaaggattttgtaggtatttagggagataggagaggaggagggagtagttttggtcggatattgtttttttagtattgtttgtattagggatttatttagttttaagaagtttttttgtgggggatagggagtatttgttagtttataggatttgaagtgtttttatgggtttaagtttttgggaaggtttgtaggtggtcgtagggttgtcgtaggggtgttggttttagggtttggatttaggggagtttgtagagggagggtagttggaggttgttttagtgtgtattgttacgaggtaaagtaaggagattgttgggtttacgttgggtcggggtggatggaggtaaggaagttttcgtcggggtaagggtattagttgtagatgtcggtagtttttttttggatacgggtttggaaggttgatagggtgtggtgagtgttatcggtttttttgtcgtggtttggttagtggttttataggttttcgtgggtaggaggaggatgattttgtattttgtttggttattattggtagtgatagataaggtgtgtggggatgtggttatttcggttcgtgttttgagagttaggtgtgggttgggtttggggaagataggggaatggtattgatttgattttgagtattttgttttggggtgtaggttcggttgttatttttttggagttgggaatggtattgggcggtggtttagggttttttgttttagcggtattatttttgtatttggttagtaaggttgatgggatttgtgtggatatttttgggacgtagattaggtagtatgatatatagggaggggtaggtagagaagggcggtttttgggttttggtttttaagttaggttttgtaagtttgttgtgttaagttttttttcggtattaggttaggtgggttagggttagttttggggttgtgatgagtgtgagtgtttttaaagtgtgttatgtttaatagttgttttttttttgggtattgttttttagttagatattttatagttttcgttttagttatagatagtaatttgatttttttattttcggtaggttttggggttggggtaagaatttgttattaagtgtagatgtttttagagggtgttggtttagggttgcgtggattatagtttttttatttttgttttagatttatttgtaattttggagaaaagatggtttagtggacgtttgcggggaggagggagttggtttttaggatgagtagatttgggggtagtttttattacgggatcggtgatttattgttattagcgttagtgaatggtagaggggttttggtataaggtttgggtttagaatgggaatttgtagagaaattgttaaggtttttcgttatttgatattttcgtttggttgttattttagaaatatttttgttgtaagaagatgggggagtttgtttggggtatggtttggcgatattaatttgagaattttaggtttaagtgttggtttttgggttttagttgttttttgagttgtaaagttggtttttgggtatttgtggaaaatattggattttttattttattttattttatattttgggatatatgtgtagaacgtgtaggtttgttatataggaatataagtgttatagtggtttgttgtatttattggattttttaatttagttttattagaaatgattgtttttttttttttttttcgttttttttttttttttttttttttttttttttttttttgttttttttttttttttttttttttttttttttttttttttttcgtttttatggggatataatttttatattatattattcgtcgatttagaaagtatagttgagtggtatttttttataattttttataagtattatttttaattttagaacgttttttttattttaaaaggaaacgttattttcggtatatagttatttttttttttttagtttttggaaattattaatttgcgttttgtttttatagatgtatttattttgaatatatgattagaattttaaaagatgtgattttttgtgtttggttttttgtagttggaatgtttttagagtttatttgtgttggcgtacgttcgtgtttttttatggttgagaaatagttcgttgtgttgatttagtacgttgggtttttttacgtatttgttggcggatgtgttagttatttttggagtcgggtgtgttgtgttatttacgggttgtattaggagttggggatattattgagtaagttatagtttcgggtatttaggagttcgtagagtaggagttgggagggaggttaggaggtgtatggtttgtttgttaggttggagagatttgtaaaaagttattttgagttagaaattagagtttgaggtttttgatttttagttgcggagtcgggagggaagttttgtattttgttttgattgtggggtgacgtgttagttattgtttaaattagaatttttttgagagtcgacgtgggtattgttgataattagtttggatattcgaaagaatggaaagtagggatttagatagatttttgtataatcgtgttcgtagtagggcgaggtttggaggtgcgatggggattttaacggggtagttgtcgttttgttggagtttacggtttttggggggggttataggtgttaatcgtatattatataagtaggagtgtgaaattttagggttgttaaatttagtgagggttttgtgttggtttggttatttatagtggtattttaggaaaaaaaattattttatggattttagtttttttattagtaaagagtaggttggattggaattttgtattatttagtatagttgttatttatgaaatgtggttatttaaatttaaataaaaatagaaatttcgttttttagttggattagtttagtgttaagtgtttagaagttatttgtgaatatattgtggtaattttttaaaaaacgaaaattagaattatcgtagtattttataattttatttttgggtgtggatttaaaagaatgtatagtattttaaagagttagagatatttgtatatttatatttatagcggttttgtttatagtagttagcgggtagaaataattcgaatgttcgcggttaaatgaatggagaaattaaaggcgggataggtcgggcgtggtggtttacgtttgtaattttagtattttgggaggtcgaggcgggtggattatttgaggttataagtttaagattagtttgattagtatggagaaatttcgtttttattaaaataaaattagtcgggtatggtggcgggtgtttgtaattttagttatttgagaggttgaggtaggagaattgtttgaatttggggaggtagaggtttcggtgagtcgagatcgcgttattgtattttagtttgggtaataagagtaaaattttgtttaaaaaaaaaaaaaaaaagggtggaatatataaggaatttgatttagtcgtaaagaggaagttaggatatttgtaatagtaagggtgaatttttcgggtattacgttaagtgaaataatttggttataaaaggataattttgtaggattttatttatattaggttcgtagagtagttagatttagaaaaatagtagaatggaggttgttagaggtttgggggatggggttggggagttgtttaatgaggatagtttgttttataagatgaaaaagttttggagatttgttatataataatgcgaatgtatttaatattattggattgtatattttaaaatagtgatcgtggtaaacgttatgataattaaaaggaaaagttacgtggttagtggttattacgttgagtagcgtaggtttcggacggtgtcgtggttatagataatggagtgggtgatttttattattgtttttagttgtttgagtattatggtgttttggggttaggatgaaagtgtttttgggtatgggggtttttgttttttttatttgggagttttgaaggtagattttaaagtttatttggttaggtaggagagcgaggcgggtttttgtattgttttttgcgtgcgtgtttgtttgcgggttagtcggggtttgtaaggtcgtttttcgagggaggggttgtaggaatggtttttatttgtgtagaaggtaagttattgttttacgttaatggtaaagatggggttcggttgcgttgtattattattttttaagcggggtttttggtgggtaggatgtttggtttgatttgagtttttgtagtgagtgttggtgtttgtggagggatttagttgtagttgagtcggtttttttttcgttttgggttttaggggcgttgggggcgagaaaggagagtttagggggtagcgtttttttttaggttttgttggggagggttgagggatgttggggggaggtgggggcgggtaggggttggttttagttttaggtaaaatggtttttagatttataggtagatggaagcgattttcggttacgtgggtggggattgaattgttgtttcgtaaggtaaggttttatgtttggttttaggaagcggttttaaagttatatggtttatggttagatgtagggttgtgtttttgtttatttaaaggttttggaagtttaggggagagtatttttgaagggggagtaggagtaggagtaaagttttgaaggtttttaggttgcgtggtttgggtgggggttacgtgggggtatagagagaggagttttggtttttaggttcgtttgtgggtattgtttttagtagtggagatgtgtggatttttttttggtattttttaataaggaattatattgtttttttgtttttttaattttataagataggaatttttgtgttttgtggaggttgagaagacggggaggtgtttgtgaggataaattagtttttagtttttggtttttagagttttttttttttttatttttgatgttttaggtttggggagttttttttcgatattttttgatcgttttagtgaaataggtcgagagggatggtttgaatcggttggggatgtaggttgtagttagggggtttagtgggtattttttgagttcggtttttgtttcgtaagtggaagggtagttgaattgaagttttttattgttttttttggtttggaagtttgttttttattttttgggtagagtgaggagtgggcgtgggtcgggagggttgttttttgtttgggagggttgtttatttgtttgttacgggggatgagttttttgtagtttttcgtgttgtggttttggtttttacgtcggttttatttttttgtggttgtttttgttgggtgtttatcggttttagggaaaagttatttttttttcggaggattggcgggaggggttttgtttgggagcgtgtcgtgtggtttttgttttagcgtaggatgtttgaggttagattttttttgggaggtaggatggggtaaaagttttttcgtaggtagagtagggtttggatgggtttaagtagggacgggggtatagaatagtagtcgtttagtttgcgtgggagttgagggttattaagggtagttttagtttgtggggattagtagaggtattatttttgtgattagcgagttgtttgtatttgtatgcgtatgtattagtgagtgtggcgagtttgaggtgtgttgggatttggttcgtgtattagttagttttgatgggaattagttttattttgggtatttttggaattttattgtgtgggagtatttgggtttttagtaggcgtttttcgggcgttcgtttttagttttaggtttttgattcgtgtgtggtgttttaatagtagttaggagtagggttatcgaagggatttatagatagaagaggttttagtgatttcgggaagtttagttttacgtgttttatatatttaagagtaaaatttggttttggtttgtgggtgtgtagttcgtgggcgttggttaggtatataagacggtcgtttgggttagtttagggggaggtagatgtggtgtaggggttttttttttttatgagtttaggaatagttttgtatttaggtattcgttttgtatttagtattttttttttttttaggattgttggttcgttttatgggattgaatatataattttatggggatcgacgttggttttattttttttttttataagattatttatggggatgtgggaggcggggatatacgttggttttattttcgttttttataagattattttttttgtgttttggttcgtggatcggtttttaaggtttttgagtggtagtaggcggtatagtttatttgagtagaggtgaaggagagggttaggtttatttgggtggttcgaggtagtgtggagggttaggagaggagagtattttttatttttgtttgagtagttttttagggtacggagataggagtttagggttagttttgttttggagcgtagggggtttttagtttggtatagtttttagaagaggagatgaaaaagtttggttttgggagtttggggatggagttttgttggggaggtagcgtggttgtaggatggtagttttttagaggatattacggttagggatatttattcgggggaatttttaggggtcgtttgggtaagtcgtttagtttttttgagttttagtgttttagtttttttatttaaggatgggtgtgataattatttggtaggcgtttgtgtgtgagtttttgtttcgttttaatttttttgttgttttttttttagttattgaggcggtttttagttgcgttggcgatatggtcgatatttttagagatgtcgggtttaagtaggcgtttgtattacggaacgagaaggtttcggtggatttcggttacgtggggattgattttattttggagtagatgcgtcggaaggttatgaagtagggtttcgagtttaatattatggtggtcggtgagtttttattttgtatgttatttaattaatgtcggaaattagttttagtttttagggcggtttataagtttttgggtttggtttttttttttgtaaaatggggtagtaattttgattttaaggacggattgttagtgatattgcgtgtgtatgtatgcgtttgggaggagtttatagtttttagcggttttttagaggggtttgttttgtatatttagggtttttgagatgattttggggagtttaggtcggtttggagtaggttttgatgagtggtcgttgtttttgagtaatgacgttagtttgtgtagagggttttgtggtagttgtttttttattgttgttttagtttggttttttaggttttttatcgtattttatcgtatttcggttagaggttttttagtagtttagttttagttttgttttggaattggggtttcgtggtttttatattttttggtggtttcggagagttggaggttattacgggaggtcgtcgattagtacgatttgggtagggtgagggggttaggttggagtttatagtgggtcgtttgttgtttttaaagttttttaggttttatttaaattttatagggattttgtgaagggggcgtttcgttttttaggtagaagcgaggtttagggaaggttgttaaggttttttagtttatagggtagagaatcgtagttatcgttttgatttttagaattgtgttttgtttattttacggggtttagggaggggtttggggaagtgttttcgttaggttatattttaaataaaggtgagtttgcggggtttttgtaaggtgtttgggtattttttaggtcgggtttgtttttttgatttttgttagtcgtgtacgttttttttgtttagttttgtggacgtaaatttatatttgttagttcgatatttttttttttttttttgtattgatttgggttttggtttttttggggttttggtgttttttttgttttttgtagttttatgggattcggttgtttatggttttgttgtgtttatagttgtttggaagttggtagtttgttttaagggagggcggaggtgtggggtttttttttacggtttttattttgttttgtttgttgtgggggacgtgtttgtattttgaggatttagggttgtttttcgggaagatggttggagagaaagagaggggagaggtttaaaggtagtggttaggttgggatttatttttgtgggttacggaggggttgttttgttttttagttagggatagggtgagaaggatttgggaatttttgcgttttagttatggtataggttttttttcggagttttggttttaaggagagggagaggtagtttagtagttttcgtttttcgtggttgttattgtgatagttttgttttttgggaatggtgcgtaggaggttattttatttgtttgggttttttcgtttttttaattttgagaagaatagtggttttgattttttataaaattatttttttttagggatgtcgagtgaggaataagacgtggggtagttttgtttttttttttttttttttttatggtagttgtgtttatttgtagaggtgtaggtaaggtggaggggtatttgtttggaggtttatagatttcggggagaattttagttttgttttaatttagcggggtgaggtttgtgtgtttttttttgggttttttttttgtgagttttagttttttcgtttataaaatgggattattttataaagtgagattaagcgagttaggtttcgggtagggtttttaataggttgtggttgttcgagaatttgtagtagtggtgatggtggttgtggtgatgaggatgatgggggtggtaatgacggtgatgatgatggggtgatggtgttagtggagatgatggggatgatggtgatggtggtggtgatagtggtgggatggtagtggtgatgtgggtgatggtgattgtgatggtggtggtggtggtgatggaggtgatggtgatagtgattatgagggtgatggggatggtggtggtggtgatggtgatagtggtgggatggtagtgatgatgtgggtgatggtgatggtggtgatggtggtggtggtgattgtggtggtggtggtgatgatggtggtgatgatggtgattgtggtgatggtgatggtggtaattgtgatggtggtggtggtgatggtggtgatgatggtgattgtggtgatggtggttatgatggtggtaattgtgatggtggtggtgatggtggtgatggggatgatgatggtgattgtgatgggggtggtggtggtgattgtgatggtggtgatgtgggtggtggtggtgattgtgatggtggtgatgtgggtggtggtggtgattgtgatggtggtggtggtggttgtgatggtggtgatgtgggtggtggtggtgattgtgatggtggtgatgtgggtggtggtggtgattgtgatggtggtggcgatggtggttgtgatggtggtgatgtgggtggtggtgattgtgatggttgtgattgtgatggtggtggtggtgatggtgatgatggtggtgattgtgatggtggtgatgggagtgatgttggtgattgtggtggtgaagggggtgatggtggtgattgtgatggtggtgaagggggtgatggtggtgattgtgatggtggtgaagggggtgatggtggtgattgtggtggtggtaatggtgatggtggtaaaggggtgatggtggtgattgtggtgatgtgggtggtggtggtgatgtgggtggtggtggtgattgtgatgggggtgatgatggtaatgtgggtgatggtgattgtggtggtggtggtgatggtgatgattgtgatggtggtgaagggggtgatggtggtgattgtgatggtggtgattgtgatggtgatgtgggtgatggtggtgttgatgggggtgatgatgttagtagtggtggtgatagtgatggggatgatggtggtgttgatggtgatagtggtgggatggtagtggtgatgtggttgatgatggtgttggtgttgatgattgtgatgatagtggtggtggtgatgagggtgacggaagtggtgatgatggcgggagtgatgggatgatggtaatagtagtgatggtattgtgatgatggtgttgatggggatggtggtgatgataagggtgatgatgatggtgatgataataataaaagtaataataataaagggatatattttgtagtattttagttggtattttttagatttaaggtgtcgtggttggaatattgatataatttttgatttgaggttggttaggatatagatttggtggatagagagagatggacgaggagtgttcgtttttgggttattaaatagtttaggttagggatttttagtattagtttttgtttttttaggagtttatattttttttagaaaggtgttattaaagttagaatattagtgtaatttagggtgttttttgtgttgtgtttttttgagatagggttttattgttgtttaggttggagtgtagtggtatggttttgatttattgtagtttttatattttgggtttaagtgattttcgtgttttaggtatgtgttattatatttggttaatttttgtgttttttggtagagatagggttttattatgttggttaagttggtttcgaatttttgattttaagtaatttattttttttagttttttaaagtgttgggattataggcgtgagttatttcgtttggtcgatttttgtttttttaaaagatagggtttttgttattttggagtggtaatgattttagtttattgtagtttcgtatttttgggtttgagtaatttttttattttagttttttgcgtagttgggattataggtgttcgttattatatttagttaatgtttatattttgatgtagagatagggtttttttgtgttgtttaggttggttttgaatttttgggtttaagtaatttttttgttttagttttttaaagtgttgggattataggtatgagttattatatttggtttagggtattttttttggtgtgttgttagcgtagtttaaggtagttttgtgtagggtaaagtaatggggtttcgagtttggaggggtgtgtgtgtgtgtgtgtgtgtgtgtgtgtgtgtgcgcgtacgcgcgcgcgtgttatatgtgatttgtttgtgtgtgttgtgagagttgtgtgtgaggtatgtgtaagaggtatgtttgaggtgagttgtgtgtgtgttgtgagttgtgtatgtgaagtgtgtgtgttgtgaggtgtgtgtatgaggtgtatgtgagttgtgtgtgttgtgttgtatatgaatgttatttttttattttcgtttgttttagttatttgtggattggttgtttgtatatacggttattgtttttcgagtggtattattttgtaggttagcgttttttagtatatggttttatagattttatgggatatgcgtgagtttgtttgatgtttatattagttttacgggggaaggattgtttattttattttgtagattaggaaattgagatacggtgaggttaggtgatttgtttaggttttggtcggttagggaggagtagtttgaatatttgggttttggttgtaattattttggtgaattgtaggaatttcggttatttggtgtattttgggtagttttgggttttttcgttagttcggtttttgttttgtttaaaatttgagttattaggagattttttgtttagaaagtataaggggtataagagatgtcgatttttttaggttcggtttattttttaggagaggattgtggtttgggttgtgttggtattagagttcggttgtgtgggtttatatagttattggatattcggttcgagggtgaagttttcgggggttgtttggtagggatattgtcgggaggtagtttaggtattgttgaattttagattggagagtttcgtgtttgggtgggaggggttttatgtgtagattttgttggttttttcggagagatttttgatcggttttttattttttttttagggtagagcggtttgggtaaatttattttaattaatattttttttaaatttaaaattagtcggaagtcggtgtagtttattttagaggagcgtatttttaagattatcgagattaagtttattacgtacggttagtggtcgggagtgggttgggggtgtaggacgtttttgtttttttggagtataggggttgggggttaagattattatatatagttagtggttaggggcgggttgggggtgtaggatttttttgtttttttggagtatagagtggggggttaagattattatatatagttagtggtcgggagtgggttggggatgtaggacgtttttgtttttttggagtataggggttgggggttaagattattatatacggttagtggttggggatgggttggggatgtgggatatttatgtttttttggagtattggtgcggtgtgagggtgttcgagttaggtaattttaggtttttaagacggggattcgttgtgtttattatttttagtatgttgagtatgttggggttttggttgtgatgggttagtgtttcggatttttgtgggtttcgttatattgagttttttatagataattgagttttttattaaaagtttgataggtaaggggtttttaggggaatcgttatcggtttgtgtcggagttggttgaggaaggttattaatttttcggtgtttttttggttgttatcgttgtttatttggggttgtttcggggttagttaggtgtggggtgtttgtgagggtttttcgttttttttttgattttgcgttcgtggttttgtgtagatattgaggagaaaggcgttcggatgaagttgatagtgattgatatattagggttcggggattatattaataacgagaattggtgaggtttttttagggggaggagtattagcgggggttttagggttttttggattttatttagagttagttttagaggtttttcggttcgcgggggtgtagggtttattttttgggatttgatatgttgttaaagtcgtacgttttaggggtttgaaaattttggattaaagtagaattatttggggaattttgttgtttttaatttattatttgaggttagttcggggaggttggtttgggaggtcgagggtaaggttgtggtattttcgtttagtaagttagattttttagggtatgtattttattggaaggtggggtgttgggttttgagttttgggaatgtacgatttgtttggggagggtattttatgtgtttgttgattcgtttttattttttacgtagttggtagtttattatgaagtttattaatgattagtacgagaaatatttgtaggaggaggttaatattaatcgtaagaagcgtatttcggatattcgcgtttattgttgtttttattttattttcgttatcggttattcgtacgtttttgtagtgtcggcgtttttatgtcgggtgttttgggttttttttgttttttgggattgtaagacggtgttgtttgttttgttgttgggtgtagaggggttgagttaggggttatggtcgttagttatgaagttgggggtgtgttatgtttgtatttttaaagttttatattgatttttatgtaagtgttttgtttagtttttattttttagttgcgttttggggagttgagggttaggtaggttttgggttgttttggagtttggtggtttgtgttttgtttttttaggttaggttttggtaggtggagtgggagtttttagttaagtattcgtagcggtgattgatttttttattcgggttttgttttatgggattttttagagggtttggtgcgtttttagacgggaagtatagagattagtgttggttttttttagggttggacggggttgttgttggtgttggtgagagtttttttttttcgtcggttttgttcgtatttgacgtcgtttttagagattagtaagggcgggaggttgtatgtattttggtaggtggattttttatggttttacggattttttgtttttagttttttgtgtattttttgttagatatttgtggtttattttgagttagggttgggaggaggaggattagaggttagtaggagtggttggtggaggtagtcgtgggtggtttgtttgtatgggtgggtggagaaggtttttcgtatttgttgttttagatgtatttttttgggcggaggaagtttaggggtttggggaaattatattttgtgggtattaggtgtaggaaggagtttggttggtgggtagcgggttttatttagagtttgtgggaaaatttaagtcggagttttcgagtttattttttggtattattttttgtgggttagtaggagttaggggtagggggttagttcgttgtttatgggttttttttgaattgaatatttgtttttttaggtagaacggtttatttgcggttttgtggtagttgttttagttgttttaagttttgttttagttgaggttgatggtaggaggtagaagttttttttgatgttagttgggtaagtcgagggcgggcgggcggtttgtggtatttttgttattttttagtattgattttttggttgggattttagttaggtatgttgtttggtttcgtttaaggcgtttagttttatggggtaggggcgggttttggttatttttgtttaaatttttgttcggagcgggtttttttttagttatgtgtgtgatcgatttatttttattgtgggaaaagttcggttttagaattggggaagatggtgttttagttttagggttttgttagtttttgttatttatagttttttttatattagattttaggtttattggggttaagtaggtaaggggagtagttcgtttggtgtaggggagtagttcgtttggtgtaggggtatcgtatattggtgttagtttttattttttttgtttttttttttttagttaaagttttatagtaagacggttgttgagttaacgatagtttttttgtgtggatatgtaggggtgtggttgggattttagaatttatggacgagggtgtttggagttggttttggttcgtttggtttgtgtagtggtgttatttgtgtttgggatatattcgtgttttttttttgttttatatttatagcgtggtcgattcggttcggggttttgtttttgttagtagggattttcgtgagtttcgagttagtatttgagagtgtcgatatttgtttgggggtgggtgtttttttattgtttcgtttttttagatgagttttacgtatatttttttgttttagttttaggtttttggatatcgagtttatgaaacgtttgagtaaggtggttaatatcgtttttgttatcgttaaggcggatatatttattttggaggagagggtttattttaaatagcgggtagggttttatttttatttgttttagtttttttgtgtaatttggagacgttgtaggtttggtaggggttatttcgtttaaaggagttatattgttagggagatcgaatcgttggttattttttttagcgggtggttggtttggtggtttttggtttaggtggttgttgggggtcgtttttgagatggtttttttagtttttttatattttaaaagtagttttgtgggagtgttaattttttagtagagtttttgaggggggttttggagaagatttggattaggtagatggtgaattttttttttagggagtgaggtcgagtaggggtcgtgcgatatggtttattttgttttatgttttttttttttttttttgagaaagggtttggtttagttgttaaggttgtaatgtagtggtataattatggtttattgtagtttttattttttaggtttagttttcgagtagttggaattatagacgtatattattatgtttggttaatttttgtatttttagtagagacgaggttttgttatgttgtttaggttggtttttaatttttgggtttaagggatttttttgttttagttttttaaagtgttggggttataggtatgagttattttatttcgttttgtttggtttttattagatggaagagaagttgggttaggtgtggtggtttacgtttgtaattttagtattttgggaggtcgaggcgggtagattatttgaggttaggagtttgaggttaatatgatgaaattttatttttattaaaaatataaaaatattagtcgggtatggtggcgggcgtttgtagttttagttatttgggaggttgaggtaggagaattttttgaattcgggaggcggaggttttagtgagtcgagattgagttattgtattttagtttgggtgatagagcgagattttattttaaaaaaaaaaaaaaaaaaaaaagttttaggagggatggtttttgttattttttttttcgttatcgtttgaggtttttgttgtgggatagggaggggtatttaagtaagagggtagttttgggtttttttttttgatagggtagtatattagagttatatggggtgttttttaaaatgaaatcgaggtgtttgggttgcggtattatatttgtttcggtgggtgtgggtggggtttgtaatttatttcgttttggggttaggtgttagggatttttttagtatgtgtaggggaagatagtttatataaagtgggtgtgtttgtcggaggttatatacgggttgtggtttgtgtttgggtaggcgagtagtcgtttattgggatgtttttgttgtacgtatttatgtcgggttgttggtagggagttgagaggttattgtaggcggggtttttgttggaattggggattgtgacgagggttttttaggaagggttttaggaggggaggtttcggtaattttgagtatttttttggggttgtgatgagtaggagaagagaggtgggaggtgtttaggacgatgattttaagtttttggggagttgtagcgtcgtttaggatagtaggtgtatttgtagttgttttttttttttttaggaggtataggagttggaggtgattggtgttatagttttttagagtttgtttttgaattcgagtttggggtagtatatagtgtggaggttatgtggtaaatattagtgggtgggtagagtttgttatagggatgggtttatttttttttttttttattttagattatcgtagatttgttgtttaacggtatcgacgtgtatttttagaaggaatttgatgaggattcggaggatcggttggtgaacgagaagtttcgggtgagtggatttattaggatgttgtttttaggggatttttagtttttgttgaagggtgggttgggggtttggaggattttaagttatgaaattatatttttggggttagagggtattgagtttaggtgtttgtatttagtgttgttaggttgaggttttcgtttttgggggattttaggtttagggtagtttttttcgggggtttaggggagggaattgttttttcgtatatgtgtaattaatatcgtttgttcgttttttaggagatgattttatttgttgtggtgggtagtgattacgagtattaggttaacggtaagaggatttttgggaggaagattaagtggggtattatcgaaggtattcgtcgtaggcgtcggggttttagatagatgggaagatagttttttttgttgatttagagtttgtgggttacgtttgagttagggattcgtggaattttatttattgttttgttttatttagagggaggggtttttttgtttttatttaatttttgggaaagtgagagggtaagtggtttgtgtagatgtttttattttagattttttttcgggtagggaaagatttagggagataggagttgggatgggggtcgttaagttttggattttggtgtaggtttttttataggtatttgtgtggttttggataaatcgtttaatttttttgggtttagaaaaggggtgggttgtagttttgtgagttagatggattttcggttttttattttgttgaagtttttgggatttttatattttagttttttgagtggttgttgtaattaattagtataaacgaggggatttaaaataatataaacgtatttttatagttttagaggttagaggttcgaaattaggggttgtttttttttgaggttttgaggattagttttatttatgtttttttttttttggtggcgtttggtatttttagttgtattgtaaaggtattatatgttttaatttttgttttattgttatagggtttttttttttgtgtttttgtttcgttttttttttttttttttttttttttttttttttgtttgagacggagtttcgttttgttatttaggttggagtgtagtgttgtaattttagtttattgtaatttttgttttttgggtttaagtaatttttttgttttagtttttcgagtatttgggattatagttacgtattatttatttgatttaatttttgtatttttagtagagataggatttcgttatgttggttaggttggttttaaatttttgattttaggtgatttgtttattttgtttggttttttaaagtgttgggattataggaatgagttatcgagtttgtttttttttttttttgtttttggataaggatgtttgtttttggatttagggtttattttaagtggatgattttatttggagatttttaatgaatttataaagaaagacgttttttaagtaaggttataattatgggttttaaggtttggattttgattatgtttttgaatggatgggagtttttggggggttatagtttaatttatttttggcggtgatatttcgggagggatgggttcgaacgttttttttttttttttttttttgtttttttattttttattagaatggaagaggggaaggtgtagagggaaatgtagtaggaaaagttattttgttttgggagagtatttggttgaaaggtttagtagagtaggaagtataagttttttaattttttagggttttagtttttattatttataaagtgggtgtagtgtgttaagattttagtgagttgagagattgttttaaagattatagagttttttgggaagttgttgttttaaaaaaatggttataatgataattattaggaggtattagatatttttgtgttattggttagatatgggttatttcgttttatgttcgaagtttttcgtatttattttttttgtagagttgaagaggtgttgtgagtagaaaatttgttaagggatttagaacgggaggcggttttagaatttatagttttagttttgtattagattttttcgagatgggagtttatgtttggaggagggtgtggagaggtatacgggttttttttttgtttgtattttttttttattattatttttgtcgggtttattttgcgggagttgtttagttgggtgtagtttgggtgttttttagtattcgtttgtggtgttaggttggtttgtttttttttggtttttttgtttgtagtttttttttttttttttgtttaaagagtttttgttgtttaggaaattttttatgaaaggtaggtttgggagagttagggatggatgggtttgggacgggtcggcggttttgttatgggcgtgtttttgttgtattttggtggttaattttgagtatcgtaggtggtcggtgatagaaattgttaggaaatgtataagagagaggttttcgtatttttttgatttgtgcgttgttgagtattattggttttagttgaggaagagtttggaatttgttaggatagttgtgaggtggtggggtttattttttagtagttttatatgaggattttggaaatgtgtttttagtattgttgggtttttatattaggggttttatgagtttatagttgatttgatattcggattagtaagggttgtgttttgtttttgttttttatttggtgaatagtattttgaggtattttttttatttttagaaattattttaagtattgttaatagaaatgtggggtgtaattgattacgttatgaatttatttaatttttatgtttttgagaggcgggtgacgttattatttatattttatggatgaggaaattgagggaatgagagtaatttgttcgagttagggagtggcgattatatattttaattttagtttgagagttttattttttttgtcggttttcgttgttcgttagtgttagatgagagtgttgttggttagtttgtaggaggttttagtgtggatatcgttttatatagggtcgtggtaggagggtttaggtaaaggtaatcggtatagtattgagagtatttgagggttgggtaaggtggaggtttcggttttgtttgttggtttattaagtaaaaattagatatttttaatttggggaaaagttatgtggttttgcgatggggtagtttggagttaggtgtatgggttttgtatttcgttttagttttatgtattgtggagttgagatagatatagtttttgcgttttttatgttttattttttttttttttttttttttttttttttttttttttttttgagacgaagttttatttttttgtttaggttggagtgtcgtggcgtgattttggtttattataatttttattttttgggttttagtgatttttttgttttagttttttgagtagttgggattataggcgtttggtattaggtttggttaatttttgtatttttaatagagacgagattttattatgttggttaggttggtttcgaatttttgatttcgtgatttatttattttagttttttaaagtgttgggattgtagacgtgagtcgtggtgtttagcgtttacgttttattttcgtaagataatggggataataaaggaattataagagatatttgtaggtgtgtgaagacgaagtttattatatgggagggtatcgggtgtttttatttgttttttttgttcggttttttatttttagtgatgtcgtttattgttttttttgttaaaaggttttttgttatataatagttatatatgttaggtatcgcgtgtttatataggagttacgaagtatagtaataaaatgattattttgagatggttattagttcgagttcgagggtatttgtgggtgttcgtggttttttgtttagtttttttgagaagtggttattgtttcgagtttgggtttgtatgtattgtgtgaagtgtatatgtttttgagtaatgtttagtattgttgatttttgagtttgtgaatggtcgtttatagtacgtagtttttgtgtgtgtttttgtgtgtgtgtgttttgagcgtatataaggtggatggggtcgtgggggtaatattttgtgggttataggttttttttaaaattttagtttcgatttttgttttattttatttttagtagtttagttttttgtttgtttttaggtttttgttgggacgttttgttttttttggttattttagtggtgcgggggtttattgttttggtttttttattgtggtttttttttatgtttttatttggtttggttattgtgttattttttattagttaggaattttttggagagtaggagttgagttgtttaggagtaggagttggtgttggttattttagtattttttagattgagggtagtgttaggtgttttatatttagttgtagagtaggtggtttttttgtttttttgtttatggggttgtttttagattttgtttttggtattagtatttttgggtagggggagagaggtggggttcgggtagagtttttttattgggatattaaagttttttttgtttttttttttagttgaaaatattatatattgtgagtttgtttatttgcgggatttttttattaggtgagagatagggtgtttgggtggggttgacggttttatttttaagagggttttatagcgggtgggggtagtgggtgtggggtcgaagttttgggtagagtgggtgttttttgttatttgtttgttttgttttcgggaagattttggaagtttattttttgaaaaagaaaatttattgggaaatgaagtaggtagtgaagattttttttaatttttgcgaagttggttggatgggaaggttgagttttgatttattgtggtttggttcgttagagttgttcggtggttattaagggtttagtgaggttttatgtgtaggttttgtcggtagcgtggggcgtttttagtttcgattttattggtttttgatttttattttttttatttggttgaggtttttttttgttttttttgagtttaggtaaggaggggaagttttgatggagagggtgttgggtgggtggtttttggagtgtgggttttggtttgggtaggtttttttttagtaagtagttggtatggatgatgggaatgttattaagaggaggggtttttaggttggcgggggtaggggtggggggatttcgggagtcgttttgttattgtggggatattgggttttttaatttttttttagattattttttttgagttgtagaggaatgaaaattcgagtttaggattttttttttttggggataagggtaatttagttttttgttttaggttatttgtttgttataggttatagttttggaggtcggtggttatttattgtttttattttgttagtattttggatatcggtttggagtaataatgttttagttttgtttttttgagtttatgtattgtttttgggttttggatttagggttatagggtggatttagagggagatatatgtattggaatatgtgtgttttgatcgagtttgggtttattagggggattgattttttttttaaaacgtgtattagatttggtttaatatggtgggtttgggggattttatggggagttaagtagtcgggatggggagtgggggtgggggtaggcgggtttgagttcgaggtaggtcgagtagggtttttgtttcgttgtttttatttcgttgcgtttattttattgattcgttcgttttttatttttataggacgtatatgtagaatattaaggatattattagtagtatttatttcgaggcgtatcgtgtgaagcgttttaacgagggtagtagcgttatggttaacggtatggaggagaaggagttagaagtttcggagatgtagacgttattttgtttattttcgggattttgtttttaagttattttcgtttttttttaggtttttttattattttattttattttatatgattttttttatttgttatcgttttttattttttcgatatgttgttaggaaataagggaaggggttttttttcgagtgagttagtgatgaggtcgcggttttttcgaggttgtggggaggttgtattggagttataggtaggggtgagagtatttattgaattgatatgattttttgtttttaggtttggtttttcgagggtttagaagagtagtttcggtgtgtagattattcgtttgtgtggggtttttagtgtcggaggttttggggtgggggttaggtttcgtatttgtagaggagtttagtgggttgtacgtttttttttatttttatcggttttgttttttggagtgtgttagagtttaggggagaatgtagtttattaggagtatttggattttttgttcgttatatggtgtggttattatttagtttttatttttgttttgtttttaagggtagaaaattttagggttttttgttatcgattgtttagttattttaagttttttggtagttgttttttttggagtagaaagtgtttttattttagttattcgtagattgtttggttagatgcggggataggttggaatgagggaggcgtttttatttttttgttattttttttttacgttattttcgtttttatcgggttgtaggtgttgttgatgcgttgggatttgattgaggataaaaaggaaggagagatgatttttatttttttattttttagttttgaaaaggtttaagtaagtgagtttggtggaggagttgagggagggagttatggaaggtgttagaaggaaggttggcgggggtacgtgtgggtcgtggtttgggttggttagagtggcgtgagttgttcggcgtttgttttgtttaagtgattagggaagtgtgtgtgtgtttatgtgtatgcgtgttcgtttgtttgtttagtgtttgggtttggtttaagattgggttgtagttatattaatgtttagttagttatttttgttatttattttttttggtttaggttttgttgattttttgagttggggaggtgggaggttaggcgagtttgattttgttgatttattcgtgtttgggtttttttttttagagtttatggtaacgaatttttagaaaggagagaacgggcgttaggggtgtatagtttatagttgaagagtaaggtttcgtggtagtacggttcggttttttattttttgtttttacgaggggatttatgggggttgtttttgtagggtatagatgattaaagtttttttttgttttttgttatttgttttgtttttggggagaaagaggggtttgatgagattttatttaggtgtatatattattaggtgtatttgtaggtatcgggttggttgtttgtagttaggagaaggttagcgagaaggagtgtatgagtgtgagtgtgtgtgtatggaagttggggtattgggcgtttgattttttttttatttaagagaggaaggattttttattatttttattggtgagatagtttattttgttaatttgttatgtttttgttaaaattaagattttgaaggaaatgagtggttagcgttagggtttaggttatgtggtttgtttagttttaatgttatttggtggcggggtggggtgggggtgggtagtagtattttagttttgagatgttttattttttttttttgtaattagattttgaaaaattgttcgttttattaggttttgttttttaatggttttttgttacgtgtttttcgagaaatttgtttttttgtataaatgataaagtgttgaaaatgtattttttgaaataaatgttttaaatgtagaaattta

SEQ ID NO: 6 - DNA, 221909 bp, Artificial Sequence
  chemically treated genomic DNA (Homo sapiens)
tgggtttttgtatttgaaatatttattttaggaaatatatttttaatattttgttatttatataaaaagataaatttttcgggaggtacgtagtaaaaggttattgaggaatagagtttgatgaaacgaataattttttaaagtttggttatagagaaggaaagtgaagtattttaaggttgggatgttgttgtttatttttattttatttcgttattaagtgatattgaggttgggtaggttatatggtttgggttttggcgttggttatttattttttttaaaattttggttttggtaaaaatatggtaagttggtaaagtaaattgttttattagtgggggtggtgaggggtttttttttttttgggtggggagggagttagacgtttagtgttttaatttttatgtatatatatttatatttatatattttttttcgttgatttttttttggttgtaagtagttagttcggtgtttgtagatgtatttggtgatgtgtgtatttgagtggagttttattaggtttttttttttttttaggagtaagataggtaataggaagtaggaagggattttggttatttgtgttttgtaaagatagtttttatgggttttttcgtggggatagagggtgaggggtcgggtcgtgttgttacgaaattttgttttttagttgtggattgtgtatttttgacgttcgtttttttttttttaggggttcgttattatgggttttgaggggaggggtttaggtacgggtagattaatagagttaggttcgtttggttttttatttttttagtttagagagttagtaaggtttgggttaggaagggtgagtggtaggggtggttggttgggtattaatgtaattatagtttagttttgggttaaatttagatattagatagatagacggatacgtatatatatggatatatatatatttttttggttatttgggtagggtaggcgtcgggtagtttacgttattttgattagtttaagttacggtttatacgtgttttcgttaattttttttttggtattttttatggtttttttttttagtttttttattagatttatttgtttagatttttttaaaattgggggatgagggggtaggggttattttttttttttttttatttttaattagattttagcgtattagtagtatttgtagttcggtgggggcgggggtggcgtgagagggggatggtagggagatgaagacgttttttttattttagtttgttttcgtatttggttaagtagtttgcggatggttgagataaaggtattttttgttttaggaggggtagttgttagggggtttggagtggttgggtagtcggtggtaggggattttggagttttttatttttaggagtagggtaggggtaggggttgagtgatggttatattatgtggcgggtagggggtttaggtgtttttggtgggttgtatttttttttgggttttgatatattttaggggatagggtcgatggggatggaggggagcgtgtagtttattgggtttttttgtaagtgcgaggtttggtttttattttaaggttttcggtattgagaattttatatagacggatgatttgtatatcgaagttgtttttttgagttttcggggagttaggtttggggatagagggttatgttaatttagtgggtgtttttatttttgtttgtggttttagtgtagtttttttataatttcggggaggtcgcggttttattattgatttattcggagggaggtttttttttttgttttttggtagtatgtcgaaggggtggggaacgatgataaatggagaaaattatataaaataaaatggggtggtgggagggtttggggggggacggaaatgatttgggggtaggatttcgggggtgggtagggtggcgtttatattttcggggtttttggtttttttttttttatgtcgttggttatggcgttgttgttttcgttgaggcgttttatacggtacgtttcgaagtggatgttgttggtgatgtttttgatgttttgtatgtgcgttttgtgggggtggggggcgggcgggttagtgaggtgggcgtagcggggtgggggtagcggggtaggggttttgttcggtttgtttcggatttaggttcgtttgtttttatttttattttttatttcgattgtttggttttttatggggttttttaggtttattatgttggattagatttggtatacgttttgggggaagggttagtttttttggtaagtttagattcggttagaatatatatattttagtgtatgtgtttttttttgggtttattttatggttttgggtttagggtttagggatagtgtatagatttagagggatagggttggagtattgttgttttaggtcggtgtttagggtgttggtagggtggaagtagtgggtgattatcggtttttaggattatggtttgtggtaggtaggtggtttggggtaaagggttgggttgtttttgtttttaggaaaaaaaagttttgggttcggatttttatttttttgtagtttaggaggaataatttggagggaggttggaaagtttagtatttttataatggtagaacggttttcggaatttttttatttttgttttcgttaatttggaggtttttttttttgataatatttttattatttatgttagttgtttgttgaggaagaatttgtttaggttagggtttatattttagggattatttatttagtattttttttattagggttttttttttttgtttggatttaagggaaataaggagaagttttagttaggtgaaaggggtaggggttagaggttagtgggatcggagttggagacgttttacgttgtcggtagggtttgtatatgaggttttattgggtttttagtggttatcgggtagttttaacgggttagattatagtggattaaagtttagtttttttatttagttaatttcgtaggggttgaaaaggatttttattgtttgttttattttttagtgggtttttttttttagaagatgggtttttaagattttttcgagggtagggtaggtaggtggtagggggtatttattttgtttagggtttcggttttatatttattgtttttattcgttgtagggtttttttaggggtgaagtcgttagttttatttaagtattttgttttttatttgatgagaaggtttcgtaggtaggtaaatttatagtgtgtggtgtttttaattaggagaggagataggaggggttttaatgttttagtggagaaattttgttcggattttatttttttttttttgtttagaaatgttggtgttaaaagtagagtttgagggtagttttatgggtaggagggtaggggaattatttgttttgtagttgagtataggatatttggtattgtttttagtttgggggatattggagtgattagtattagtttttgtttttggatagtttagtttttgttttttagaaagtttttggttaatgggagatggtatagtgattaggttaaataggagtatggaaggaagttatagtggagaagttagggtagtgggttttcgtattattggggtgattagggagagtaggacgttttagtaggggtttgaagataggtagggggttgggttgttgggaatgggatgaagtaggaatcggagttgggattttaaagaaaatttgtggtttatagggtgttatttttacggttttatttattttgtgtgcgtttagagtatatatatatagggatatatataggggttacgtattgtggacgattatttataagtttaagaattagtaatgttaaatattgtttagggatatgtgtattttatataatatatataagtttaagttcgggatagtggttattttttagggagattgggtaggagattacgggtatttataagtgttttcgggttcgagttggtggttattttagagtggttattttattgttgtgtttcgtaatttttatatgaatacgcggtgtttggtatgtgtaattgttatataatagaaggttttttaataaggagggtagtgaacggtattattggaggtggggagtcgggtagggaaggtaaataaagatattcggtgtttttttatgtgatgaatttcgtttttatatatttgtaagtgttttttgtgatttttttgttatttttattattttacgaaaatggggcgtagacgttgggtattacggtttacgtttgtaattttagtattttgggaggttgaggtgggtggattacgaggttaggagttcgagattagtttggttaatatgatgaaatttcgtttttgttaaaaatataaaaattagttaggtttggtattaggcgtttgtaattttagttatttaggaggttgaggtaggagaattattggaatttaggaggtggaggttgtggtgagttaagattacgttacggtattttagtttgggtaaaagagtgaaatttcgttttaaaaaaaaaaaaaaagaaaaagaaaaagaaaagaaaagaaaatgaggtatagagaacgtaagaattgtgtttgttttagttttatagtgtataaggttggagcgggatgtagaatttatatatttggttttaggttgttttatcgtagagttatatggtttttttttaagttaaaaatgtttagtttttatttggtaggttagtaggtagggtcggggtttttattttgtttagtttttaagtgtttttagtgttatgtcggttgtttttgtttaggtttttttgttacggttttgtgtagggcggtgtttatattagaattttttgtagattgattagtagtatttttatttaatattgacgggtagcgagagtcggtaggaagaatggggtttttaggttggagttggagtgtgtgatcgttattttttggttcgggtaagttatttttatttttttagtttttttatttataaaatgtggataataacgttattcgttttttagggatatgaggattaaatgagtttatggcgtgattaattatattttatatttttattgataatatttggggtggtttttaaggatgggaaagatattttaagatgttgtttattaagtgggaggtaagaataaggtatagtttttattagttcgggtgttaggttagttatgaatttatggggtttttgatataaaaatttagtagtgttgaaggtatatttttagggtttttatataagattgttggaaagtgggttttattattttataattgttttgataggttttagatttttttttagttggagttagtggtgtttaataacgtataggttagagaggtgcggggattttttttttgtgtattttttgatagtttttgttatcggttatttgcggtatttaaggttggttattagggtgtagtagaggtacgtttatagtaaagtcgtcggttcgttttaggtttatttatttttaatttttttaaatttgttttttataaaaagttttttaaatagtaagaattttttgggtagagaggaagagaggaattgtaggtagaggggttaaggggaggtaagttagtttgatattataggcggatattggaaaatatttaggttgtatttagttgggtagttttcgtagggtgggttcggtaggggtggtggtaggggaggagtgtagataggggaaaggttcgtgtgtttttttatatttttttttaggtatgaatttttatttcgagggagtttggtgtagggttggagttgtagattttagagtcgtttttcgttttgggttttttggtaggttttttgtttatagtatttttttaattttgtaaggagggtgggtgcggggagtttcggatatgaaacgagataatttatgtttagttagtggtataggagtgtttgatgttttttggtaattgttattatgattatttttttagagtaatagttttttaaaaagttttgtggtttttgggatagttttttaatttattaaaattttggtatattgtatttattttgtggatgatgaaaattgaggttttggaagattaagagatttgtgttttttgttttattgggttttttagttaagtgtttttttagaataaagtggttttttttgttgtatttttttttgtattttttttttttttattttaatgagaaatgaagggatagagagaggaaggggaaggaaacgttcgggtttatttttttcggggtgttatcgttaggagtgggttgaattgtggttttttaggggtttttatttatttaaagatatggttaaggtttaggttttggaatttatgattgtgattttatttggaaaacgtttttttttatagatttattaaggatttttaaatgggattatttatttagggtaggttttaagtttaaagataggtatttttgtttaaagataagaaggaaagagggtaggttcggtggtttatttttgtaattttagtattttgggaggttaagtaaggtgggtagattatttgaggttaggagtttaagattagtttggttaatatggcgaaattttgtttttattaaaaatataaaaattaagttaggtgggtggtacgtgattgtaattttagatattcgggaggttgaggtaggagaattatttgaatttaggaggtagaggttgtagtgagttgagattgtaatattgtattttagtttgggtgatagaacgagatttcgttttaaataaaaaaaaaaaaaaaaaaaaaggaagaggagggacgggatagagatatagggaagaaggttttgtgataatggggtagagattagagtatgtgatgtttttataatataattaggaatgttaggcgttattagaaggaggaaggtatggatgaggttggtttttagggttttagaaggaaatagtttttgatttcggatttttggtttttggaattgtgaaaatacgtttgtgttgttttaagttttttcgtttgtgttaattggttataatagttatttaagagattaaggtgtgagggttttaggaattttagtagggtaaggggtcgagggtttatttggtttatagagttatagtttattttttttttaggtttagagaggttgggcgatttgtttagggttatataggtgtttatgaaagagtttgtattaggatttagaatttggcggtttttattttagtttttgtttttttgaatttttttttgttcggggggaggtttggggtggaggtatttgtataggttatttgtttttttatttttttaagggttgaatggggataaggagatttttttttttgggtggggtaaggtagtggatgaggttttacgagtttttggtttaggcgtggtttataggttttgggttagtagaagagattgtttttttatttgtttggagtttcggcgtttgcggcgagtattttcgatggtattttatttggttttttttttaaggatttttttgtcgttgatttggtattcgtggttattgtttattatagtaaatgggattattttttggggaacgggtagacggtattggttatatatgtgcgggaaggtaatttttttttttgggttttcgggaggagttgttttgagtttggggttttttaaaaacgagagttttagtttgatagtattgggtatagatatttgggtttagtgttttttggttttaagaatataattttatggtttaaggttttttaaatttttaatttattttttagtaggaattgggggttttttgggaataatattttagtggatttatttattcggaatttttcgtttattagtcggtttttcgagtttttattaaattttttttgggggtatacgtcgatgtcgttggatagtaggtttgcggtgatttgggataaggagggagagagatgggtttatttttgtggtaagttttatttatttattggtgtttgttatatgatttttatattgtgtgttgttttaggttcgggtttaagggtaggttttggggggttgtgatattaattatttttaatttttgtgttttttggagggaagaggggtagttgtaggtgtatttgttgttttgagcgacgttgtaattttttaggggtttaaggttatcgttttgagtattttttatttttttttttttgtttattatagttttaagaaagtatttagggttatcgagatttttttttttgaaattttttttaaaaaattttcgttatagtttttagttttagtaggggtttcgtttgtagtaattttttagttttttgttagtagttcgatatgggtacgtgtaatagaaatattttagtgagcggttgttcgtttgtttaggtatagattatagttcgtgtgtagttttcggtagatatatttattttgtgtggattgtttttttttgtatatgttgggaaggtttttgatatttggttttaggacggagtaggttataggttttatttatatttatcgaggtagatgtggtgtcgtagtttaggtatttcggttttattttgaaaggtattttatgtggttttgatgtgttgttttgttaggaggaagagtttagggttgtttttttgtttggatgtttttttttattttatagtaggggttttagacggtggcggagaagaaggtggtagagattattttttttgaaatttttttttttttttttttttttgagatggagtttcgttttgttatttaggttggagtgtagtggtttaatttcggtttattgaagttttcgtttttcgggtttaagagatttttttgttttagttttttaagtagttgggattataggcgttcgttattatgttcgattaatatttttgtatttttagtagagatggggttttattatgttggttttaaatttttgattttaagtgatttgttcgtttcggttttttaaagtgttgggattataggcgtgagttattatatttggtttagttttttttttatttaataaaaattaggtagggcgaggtgaggtggtttatgtttgtaattttagtattttgggaggttgaggtaggaggattttttgagtttaagggttagagattagtttgggtaatatggtaaaatttcgtttttattaaaaatataaaaattagttagatatggtggtgtgcgtttgtaattttagttattcggggattgagtttgggaggtggaggttgtagtgagttatgattgtgttattatattgtaattttggtaattgagttagatttttttttaaaaaaaaaaagggggggtataaaataaggtgggttatgtcgtacggtttttgttcggttttattttttggaagagagatttattatttgtttggtttaggttttttttaaaattttttttagagattttgttggagaattggtatttttataaagttgtttttgagatatgggggagttggagaggttattttagggacggtttttagtagttatttgggttagggattattaggttagttattcgttggggagagtgattagcggttcggtttttttgatagtgtgatttttttagacggggtggtttttgttaggtttgtagcgtttttaggttgtatagaagggttggggtaagtagagatggaattttattcgttgtttgaagtggatttttttttttagggtgagtgtgttcgttttggcgatgatagggacgatgttgattattttgtttaggcgttttataaattcgatgtttaggggtttgaggttgaagtagagggatgtgcgtgaggtttatttgggggagcggggtagtgggggggtatttatttttaagtaggtgtcgatatttttaggtgttggttcggggtttacgggggtttttgttggtaaggatagggtttcgggtcgagtcggttacgttgtgagtgtggggtagaggaaggatacgggtgtgttttagatataggtgatattattgtataggttaggcgggttagggttagttttaagtattttcgtttatgagttttggggttttaattatatttttatatgtttatatagaagggttgtcgttggtttagtagtcgttttgttgtggggttttggttgggaggggagaggtaagagaaatagaagttagtattagtgtgcggtgtttttgtattaggcgggttgtttttttgtattaggcgggttgttttttttgtttgtttggttttagtgagtttggggtttgatgtggggaaagttgtgggtggtaggggttggtagggttttggaattggggtattattttttttagttttggagtcgagttttttttatagtgagaataaatcggttatatatatggttggggagaagttcgtttcgggtagaagtttaagtagagatggttaaggttcgtttttgttttatgggattggacgttttgggcgggattaggtaatatgtttagttggagttttagttaaagggttagtgttggggagtggtagaagtgttatagatcgttcgttcgttttcggtttgtttagttggtattaggagaggtttttgttttttgttattagttttagttgaggtaaagtttggagtagttggaatagttgttataggatcgtaggtgagtcgttttgtttgggagggtagatgtttagtttaggagaggtttatggatagcgggttggttttttgtttttgatttttgttggtttatagaggatgatgttagagggtgggttcgaaaatttcggtttgggtttttttatagattttgggtgaggttcgttgtttattagttaggtttttttttgtatttggtgtttatagagtatggtttttttaaatttttgggtttttttcgtttagggaagtatatttgggatagtaggtgcgaaggattttttttatttatttatgtagataagttatttacggttgtttttattagttatttttgttggtttttggtttttttttttttagttttggtttagggtgagttataggtgtttggtagggggtgtatagggagttgaggatagagggttcgtgaggttatgaagagtttatttgttagggtatatgtagtttttcgtttttgttgatttttaggggcgacgttaggtgcggatagagtcggcgggaggaaagggtttttattaatattaatagtagtttcgtttagttttggaaggggttagtattgatttttgtgtttttcgtttaagaacgtattaaattttttaaggggttttatgaggtagggttcggatgagaaggttagttatcgttacgggtgtttggttgggggtttttattttatttgttagagtttggtttgagaaggtaggatatagattattaggttttagaatagtttagggtttgtttgatttttagttttttaagacgtagttgaaggatgggggttgggtaggatatttgtataggggttagtgtgaggttttggaggtgtagatatggtatatttttaattttatagttggcggttatggtttttgatttagtttttttgtatttagtagtagggtagatagtatcgttttgtagttttaggggatagagggaatttagggtattcggtatgaggacgtcgatattgtagggacgtacgagtggtcggtggcggggatgaagtagaggtagtagtggacgcgggtgttcgggatgcgttttttgcggttgatgttgatttttttttgtaggtatttttcgtattggttattgatgaattttatgatgggttgttagttgcgtgggggatggggacgagttagtaggtatatgagatgttttttttaagtaggtcgtgtatttttaggatttagagtttaatattttattttttaatgaaatgtatgttttgggaggtttggtttgttgagcggagatgttatagttttattttcggttttttaaattagttttttcgggttggttttaggtgatgagttggggatagtaagattttttaggtaattttgttttggtttagaatttttaggtttttgagacgtgcggttttggtagtatgttaggttttaggaggtgggttttgtattttcgcgggtcgggaaatttttagggttgattttgggtggggtttagggagttttgaagttttcgttagtgtttttttttttggaggggttttattagttttcgttgttgatgtggttttcgaattttggtgtgttaattattgttagttttattcggacgtttttttttttaatatttgtatagagttacggacgtagagttagaggggagacggaagatttttatagatattttatatttgattgatttcggggtaattttaggtaggtagcgatgataattaaggagatatcgggaaattaatggttttttttagttaatttcggtataggtcggtgacggtttttttgggagttttttgtttgttagatttttggtggaaaatttagttgtttgtggggagtttagtgtgacggggtttataggggttcgggatattgatttattatagttagagttttaatatgtttaatatgttggggatggtgggtatagcgagttttcgttttggggatttgggattgtttgattcgggtatttttatatcgtattagtgttttaggaaggtatgggtattttatatttttagtttatttttagttattgatcgtgtgtgatggttttgatttttaatttttgtgttttaggaaggtaggggcgttttgtatttttagtttattttcggttattgattgtgtgtgatggttttgattttttattttgtgttttaggaaggtagaggagttttgtatttttagttcgtttttggttattgattgtgtgtgatggttttgatttttaatttttgtgttttaggaaggtaggggcgttttgtatttttagtttattttcggttattgatcgtgcgtgatggatttgatttcgatggttttggggatgcgtttttttgaggtgggttgtatcgattttcggttgattttggatttgaagagggtgttgattaaggtggatttatttaagtcgttttgttttggggagaggatgggaggtcggttaggggttttttcggagagattagtagggtttgtatatggggttttttttatttaggtacgaggttttttagtttgagatttagtagtgtttgggttatttttcggtaatatttttgttaagtagttttcgaggattttattttcgagtcgggtgtttagtgattgtgtaaatttatatagtcgggttttgatgttagtataatttaggttatagtttttttttgagaggtgagtcgggtttgggagagtcggtattttttgtgttttttgtgttttttggataggaggttttttggtggtttagattttggataggatagaggtcgggttggcggaggagtttagggttgtttagggtgtattaggtggtcgggatttttgtagtttattagggtggttgtaattaaagtttaggtgtttaaattgtttttttttgatcggttagggtttgggtaagttatttgattttatcgtgttttagttttttgatttgtaaaatgggataaatagtttttttttcgtggagttggtgtgagtattaggtaggtttacgtatgttttatggggtttgtggggttatgtgttagggggcgttggtttgtagggtggtgttattcgagggatagtgatcgtgtgtgtagatagttagtttataggtgattgagataaacgaggatgaggaagtagtatttatatgtaatataatatatataatttatatatattttatatatatattttataatatatatattttatatgtataatttataatatatatataatttattttaaatatattttttatatatattttatatataatttttataatatatataaataaattatatataatacgcgcgcgcgtgcgcgtatatatatatatatatatatatatatatatatatttttttagattcggagttttattgttttattttgtatagagttgttttgggttacgttagtaatatattaaaaaaaatattttaggttaggtgtggtggtttatgtttgtagttttagtattttgggaggttgaggtaggaggattgtttgagtttaggagtttaagattagtttgggtaatatagagagattttgtttttatattaaaatgtaaatattggttaggtgtagtggcgagtatttatagttttagttacgtaggaggttgaagtaggagaattgtttaagtttaggagtgcgaggttgtagtgagttaggattattgttattttagagtgatagagattttgttttttaaaaaaataaaaatcggttaggcgagatggtttacgtttgtaattttagtattttgggaggttgaggagggtggattatttgaggttaggagttcgagattagtttggttaatatggtgaaattttgtttttattaaaaaatataaaaattagttaggtatggtggtatatgtttgaggtacgagaattatttgaatttaggatgtggaggttgtagtgagttaagattatgttattgtattttagtttgggtaataatgagattttgttttaaaaaaatataatataaaaaatattttaaattatattgatgttttgattttgataatatttttttaggaaaagtgtgggtttttgggaggatagaggttggtgttgggaatttttggtttgaattgtttagtagtttaaggacggatatttttcgtttatttttttttgtttattaggtttgtgttttggttaattttaggttaggagttatgttaatgttttagttacgatattttagatttaggagatgttaattgggatattgtaaggtgtatttttttattattgttatttttattattattattattattattattatttttattattattattatttttattagtattattattataatattattattgttattattattattttattattttcgttattattattattttcgttatttttattattattattattgttattataattattagtattagtattattattaattatattattattattattttattattattattattaatattattattatttttattattattattattattattaatattattatttttattaatattattattatttatattattattataattattattattataattattattattattttttttattattattataattattattattattattattattataattattattatttatattattattattatttttattataattattattattatttatattattattattatttatattattataattattattattatttttttattattattattattattattattataattattattattattttttttattattattataattattattattattttttttattattattataattattattattattttttttattattataattattagtattatttttattattattattataattattattattattattattattattattattattataattataattattataattattattatttatattattattattataattattatcgttattattattataattattattattatttatattattattattataattattattattatttatattattattattataattattattattattattataattattattattatttatattattattattataattattattattatttatattattattattataattattattattatttttattataattattattattatttttattattattattattattattattataattattattattataattattattattataattattattattattattattattattattattattataattattattattattattattataattattattattattattattattattattattattataattattattattattattattattattattattatttatattattattattattttattattgttattattattattattattatttttattatttttatgattattattattattatttttattattattattattattattataattattattatttatattattattattattttattattattattattattattattattatttttattatttttattagtattattattttattattattatcgttattattatttttattatttttattattataattattattattattgttgtaaattttcgaataattataatttgttggggattttgttcggggtttagttcgtttgattttattttatgggatgattttattttatggacgaggaagttaaggtttatagaggaggagtttaggggaagatatataagttttatttcgttgagttaggataaagttgggatttttttcggggtttgtggatttttaaataggtgtttttttattttgtttgtatttttgtaggtgggtatagttgttatgggagggaggagggaggagagtagagttgttttacgttttgttttttattcggtatttttgggagggagtgattttgtggggaattaggattattgttttttttagggttgaaagggcgaagaggtttagataggtgaagtggttttttgcgtattatttttagagggtaaggttgttatagtggtagttacggaaggcgagggttgttgggttgtttttttttttttttggggttaaagtttcggaagaaggtttgtgttatggttgggacgtagaggtttttaggttttttttattttgtttttggttagggagtagggtagttttttcgtagtttatagagatgagttttagtttggttattgtttttgggttttttttttttttttttttttagttattttttcgggaggtagttttgaatttttagggtataagtacgttttttataataggtagaatagggtgggggtcgtaggaggggattttatattttcgtttttttttgaagtaggttgttagtttttaggtagttgtgagtatagtagggttatgagtagtcgggttttatgaggttataggaagtagagaggatattaagattttaggggagttagggtttagattagtgtagaagaggaaagaaaggtgtcgggttggtaggtgtgggtttgcgtttatagagttgggtaggaaggacgtgtacggttggtaaaggttagagaaataggttcggtttgagaggtgtttagatattttgtagaaatttcgtaagtttatttttgtttagggtgtgatttggcgggggtatttttttagatttttttttggatttcgtggagtgggtagaatatagttttgggagttaaaacggtggttgcggttttttgttttgtgagttaaggaattttggtagttttttttgagtttcgtttttgtttggaaaacgggacgttttttttatagggtttttgtgaggtttgaatgggatttggggggttttggaaataataggcggtttattgtagattttagtttggtttttttattttgtttaggtcgtgttgatcgacgatttttcgtggtgatttttagtttttcggggttattagggggtgtggaagttacgaggttttaattttagggtagagttgaagttgagttgttgggaagtttttggtcggggtgcggtggggtgcggtggggagtttggagggttaggttggagtaatagtgaggggatagttgttatagaattttttgtataagttgacgttattgtttagaggtagcgattatttattaggatttgttttaggtcggtttgggttttttaaagttattttaggggttttggatgtgtaggataggtttttttgaggagtcgttggaggttgtgggttttttttaggcgtatgtatgtatacgtaatgttattggtaattcgtttttgaggttagggttgttgttttattttatagaagggaagattaagtttaaaggtttgtgggtcgttttgggggttgaggttggttttcggtattggttgagtggtatgtaaggtgaggatttatcgattattatgatgttgaattcgaagttttgttttatggtttttcggcgtatttgttttaggatggagttaatttttacgtagtcgaagtttatcggggttttttcgtttcgtgatgtaggcgtttgtttgagttcggtatttttgggggtgtcggttatgtcgttaacgtagttgggagtcgttttagtggttggggaaggaatagtagaggagttagagcggaataggggtttatatataggcgtttgttaggtggttgttatatttatttttggatggggaaattgaggtattgaggtttagaaaggttaagcgatttgtttaggcgatttttgagaattttttcgggtggatgtttttggtcgtggtgttttttaaaaagttgttattttgtagttacgttgtttttttagtaaagttttatttttagatttttaaggttaggtttttttatttttttttttaggagttgtgttaagttgggggttttttgcgttttaaggtagggttgattttgaatttttgttttcgtattttggagggttgtttagataagggtggagggtgttttttttttttggttttttatattgtttcgggttatttaggtggatttggtttttttttttatttttatttagataagttgtatcgtttgttgttatttaaaggttttagaagtcgatttacgagttaagatataggagggatggttttgtaagaaacggggatagaattagcgtgtgttttcgttttttatatttttatggatggttttgtaagaaagggggatagaattagcgtcggtttttatggagttgtgtgtttaattttatagaacgagttagtagttttgggagaaggaaaagtgttgggtgtagggcgggtgtttggatgtagagttgtttttgggtttatggaggaggggggtttttgtattatatttgtttttttttggattgatttaggcggtcgttttgtgtgtttggttagcgtttacgggttgtatatttataggttaagattaagttttatttttgggtatgtggggtacgtggagttgaatttttcgaaattattaaagttttttttgtttgtaggttttttcgatggttttgtttttggttgttgttaagatattatatacgggttagaggtttggggttgggggcggacgttcggaagacgtttgttgaggatttaggtgtttttatatagtggggttttaggggtatttaggatggggttggtttttattagggttggttggtatacgggttaggttttagtatattttagattcgttatatttattggtgtatgcgtatgtaggtgtagataattcgttggttatagaggtggtgtttttgttagtttttataggttggagttgtttttggtggtttttagtttttacgtaggttgggcggttgttgttttgtgttttcgtttttgtttgggtttatttaggttttgttttgtttgcggggagatttttgttttattttgttttttagggaggatttggttttaggtattttgcgttaagatagggattatacggtacgtttttaggtagggtttttttcgttagtttttcgggaggggagtggtttttttttgggatcggtgggtatttagtaggggtagttataggggagtggagtcggcgtgggagttagggttatagtacgggaggttgtagggggtttatttttcgtgataggtaagtgagtagtttttttagataggaggtagttttttcggtttacgtttattttttattttgtttagaaggtgggaggtaggtttttaggttaggaggggtagtgggagattttagtttaattgtttttttatttgcggggtaagaatcgaatttaggaaatgtttattgagttttttggttgtagtttgtatttttagtcgatttaagttatttttttcggtttattttattggagcggttagagggtgtcggagggaggttttttaggtttgaggtattagaggtgagagaggaaaagattttggaagttagaaattgggggttggtttatttttataggtattttttcgtttttttagtttttatagggtataggaatttttattttatggaattgggggaataaaggaataatataattttttgttgggaaatgttaagggggggtttatatatttttattgttgagagtaatatttataggcggatttggaggttagggtttttttttttgtgtttttacgtggtttttatttaggttacgtagtttggaagtttttagggttttgtttttgtttttgttttttttttagaaatatttttttttgggtttttaggatttttaaataaataaagatatagttttgtatttggttatggattatgtggttttggggtcgttttttgaagttagatatggggttttgttttgcggggtagtagtttagtttttatttacgtgatcgaaaatcgtttttatttgtttgtgggtttgagagttattttgtttgggattgggattagtttttattcgtttttatttttttttagtattttttaattttttttagtaggatttggggggaggcgttgttttttgaatttttttttttcgtttttaacgtttttggagtttagagcgagggaggggtcggtttagttgtagttgggtttttttataggtattagtatttattgtagaaatttaaattaaattaaatattttgtttattaggggtttcgtttgagaaataataatataacgtagtcgagttttatttttgttattgacgtagggtagtggtttgttttttgtataggtgagagttatttttgtaatttttttttcgagaggcggttttgtaggtttcggttggttcgtaggtaggtacgtacgtagagagtaatgtaagagttcgtttcgtttttttatttggttaggtgagttttggggtttgtttttaggatttttaagtgggaaaagtagagatttttatatttagagatatttttattttggttttaggatattatggtgtttagatagttggaaataatggtaaagattatttattttattgtttgtgattacgatatcgttcgaggtttgcgttgtttagcgtggtagttattggttacgtgatttttttttttaattgttataacgtttgttacggttattattttgaagtgtgtagtttagtggtgttaagtatattcgtattgttgtgtaataaatttttagaatttttttattttgtaaaataaattgtttttattaaataattttttagttttattttttaagtttttggtaatttttattttgttgtttttttgaatttgattattttacggatttggtataagtggaattttataggattgtttttttgtgattaaattattttatttagcgtaatattcgaaaggtttatttttgttgttgtaggtattttaattttttttttacggttgagttaaattttttgtatgttttattttttttttttttttttttagatagagttttgtttttgttgtttaggttggagtgtaatggcgcgatttcggtttatcgaaatttttgtttttttaggtttaagtaatttttttgttttagttttttaagtagttgggattataggtattcgttattatgttcggttaattttgttttagtagagacggggtttttttatgttggttaggttggttttgaatttgtgattttagatgatttattcgtttcggttttttaaagtgttgagattataggcgtgagttattacgttcggtttgtttcgtttttgatttttttatttatttgatcgcgggtattcgggttgtttttattcgttggttattgtgaatagagtcgttatgaatgtgggtgtataaatatttttagttttttaagatgttgtgtatttttttgaatttatatttagaagtggaattatgggatgttacggtggttttagttttcgttttttgaggaattgttatagtgtgtttataagtgatttttgagtatttgatattgagttagtttaattgaggaacggaatttttatttttatttaaatttaaatagttatattttataaatggtaattatattggatggtatagaattttagtttaatttattttttattaatggggaaattgaggtttatagagtgatttttttttttgaaatgttattgtaagtggttaggttagtataagatttttattgaatttggtaattttgaaattttatatttttgtttgtatgatatgcggttaatatttgtgattttttttaaagatcgtgggttttagtaagacggtagttgtttcgttgagatttttatcgtatttttaggtttcgttttgttacgaatacggttgtgtaaggatttgtttgggtttttgttttttattttttcgggtatttagattaattattagtagtatttacgtcgatttttagaaaggttttgatttggatagtaattgatacgttattttatagttaaagtaaaatgtagagtttttttttcggtttcgtagttgggagttagaggttttaggttttggtttttggtttaaagtgattttttgtaagtttttttagtttggtaaataggttatgtattttttgattttttttttagtttttgttttgcgagtttttgggtgttcgaggttgtggtttatttagtgatatttttagtttttagtgtagttcgtgagtagtataatatattcggttttagaaataattaatatattcgttaatagatgcgtggagaaatttaacgtgttgagttaatatagcggattattttttagttataaaaaggtacgagcgtgcgttaatatagatgaattttgaaaatattttaattgtaagaaattaagtataaaaagttatattttttagggttttagttatatgtttagaataagtatatttgtagggataaagcgtagattggtgatttttaggggttgggggagggggagtgattgtgtatcgaggatggcgtttttttttggggtgaggaaaacgttttggaattagaggtgatgtttatagaaggttgtgaaaaaatgttatttaattgtgttttttgaatcggcggatggtgtaatatggaaattatatttttatgaggacgggagaggaagggaaagaagggaaggagggagggggaaggaaatagggaaggaaggaaaaaagggaggggaggagggagggacggaagaagggaaagaaggtagttatttttagtggagttggattgaagagtttaatgggtgtagtaaattattatggtatttgtatttttatgtaataaatttgtacgttttgtatatgtattttagaatgtaaagtaaaataaaataaagagtttagtgttttttataagtgtttaggagttagttttatagtttagaggatagttgaggtttagaggttaatatttaggtttgaggtttttaagttggtgtcgttagattatgttttagataaatttttttatttttttgtagtaagggtgtttttagggtggtagttaggcggaggtgttaggtggcgggagattttgatagtttttttgtaggtttttattttgaatttaggttttatgttagggtttttttgttatttattggcgttggtggtagtaggttatcggtttcgtgatggggattgtttttaaatttgtttattttggggattagttttttttttttcgtaggcgtttattgggttattttttttttagagttgtaggtgggtttaaggtagggatgaaagggttgtaatttacgtagttttgagttagtattttttgggaatatttgtatttagtgataaatttttattttaattttaggatttgtcgaggatgagggaattagattgttgtttgtggttgggacgggggttgtaggatatttggttgggaggtagtgtttagagaggaggtagttattggatatgatatattttaggggtatttatatttattatagttttagggttgattttggtttatttggtttggtgtcgagagagggtttgatatagtaggtttgtaaagtttgatttggaaattaagatttaggggtcgtttttttttgtttatttttttttgtgtgttatgttgtttggtttacgttttagaaatgtttatataagttttattagttttgttggttaaatgtagagatggtgtcgttggggtaagggattttgagttatcgtttaatgttatttttagttttaggggagtgatagtcgggtttgtattttaggataaagtgtttagggttaagttaatgttatttttttgttttttttaaatttaatttatatttggtttttagagtacggatcgaaatggttatatttttatatattttgtttgttattgttaatggtggttaagtagaatgtaaggttattttttttttgtttacggaggtttgtgaagttattgattaggttacggtaggggagtcggtggtatttattatattttgttagttttttaggttcgtgtttaggagaaagttgtcggtatttatagttggtgtttttgtttcggcgaagatttttttgtttttatttatttcggtttagcgtgggtttagtagtttttttattttgtttcgtaataatgtatattggagtagtttttagttgttttttttttgtaggtttttttgaatttagattttggggttagtatttttgcggtagttttacggttatttgtaggtttttttagaaatttgagtttatgggggtattttaggttttataaattaatagatgttttttgttttttataaaggggttttttaaagttgagtgagtttttgatgtaggtaatgttaggaggatagtgttcggttagggttgtttttttttttttttttatttttttgggtgtttgtaaagttttttagatttttgttgaattttggggaagttttgtttcgtaattagggtttgtttttttcgtttttatatagagtttgttttttgcgtttagatagtttttttacgatggtaattgaataatgatgtgtgcggtttttttttattataatttttttatatagggtttgtgaagttagatattttatttattacgtttattttagttcggttttttttagagtagcgtagggtttacggtaagtttcggtaaaaagtttggtgaatgaatgaataaatgaagaaataaagtttattatagtagtcgaggtttattgggggttttttgtgttaggcgttattttaatttttttttttagagagtgggttttattaatgttggttaggttggttttaaatttttggttttaagcgatttttttattttggttttttaaagtgttgggattatagatataagttattgtatcgagttttaggtgttattttaaacgttgtttaggagttattataattgatggattattatataattttataaggtagttattgttattgttttattttatagataaggaaatcgagatcgagagggtttttgttaattatgagggtcgtaaagcgagtaagcggtagagttaggatttgaagttaggtaggtgagttttaggttgttgattttttttttaggttaggttttcgggaattatggaaaggttggagaagtatggggtttttgtagttaggatttagaaggtgtagttgcggtgtaggtagtttagtattgaggttttggtttttagttttttttttagttgtttttttttagggagttggaggtagagttttgaattgttaggagaagattttattcgttagttagggaaagttgttagggttttttttagggtttagagttattttaggtttattaaagtatattagtattttagtttttataattttttttgtaagaaagatgatggtattagttattgggtcgggttgggggttttagattttaggggtttttttaggtttgtttatggtttttttaggatatagatgtttatttgagaaattttagtgtattaggggttttatagttaaaataaagaggtagagttgttttggggtttttgttaaagtttttaggtagatttatttagtagatattaaaatgtttattttttatttgaaaattttatttttaggaggtcgttttaggttgggttgataaaatttatagagattttaatgatgattttttattttaggtatgagtgagtgggtggagggagaagttattgttaattattaatagtttaggaaatgtaggtaaaggaaagagaatggtaaggcgatagggttggaaattagatatacgtgtagaggtgagtagattttagagaaagaattgttttggaataagatggtaaagaaattatagataataatggtagacgatgattttggggttttagtggattaggattataatattgatttatttgataagtatttattgagtgtttattttatagtaataaaaagatgatattataggtttgagagtagttagaatgaaaatagtggtggtatatgggaatttgaagtttatttatttaaatgtttattagtcgagattttcggatagatttgaagtagtttttaatatgtaaggaatttataatttgatatagtagtataggatatgtgtgtgttataaatttttggtgaaaagtaaagattttttttagaaaagtatatattgaagatagatagatagatatatacgtattttgaacggtttattaaagaatttttaggttcgtggattttagttaaaaaaataatttggtattttgggaggtcgaggcgggaggatcgtttgagtttaggagtttaagattagtttgggtaacgtagcgagattttatttttataaaatgaaataaaataaaatgagaattaaaaaaaataaataaatttggtgtgatgagaatttatagaatttaatagggttattttagtattatttgtagtattttttaaatttttgattatatatataaagttttgggttttatagttagagaagagggagagtaggttaaaaataattatttaaggtggaagatgagtttgagaaataaagaggtaagaggagaagattgaggttagttgttttttatttttgagtttcggtaggaggaagtttttaagtgagaataagttgttgtttgcggagtggattttagagcgggtggatagagacgataaggaatgttatttttggggggttttgaaaataggatatttttttattttaattttgttttttattgtattgtgtttttattgatttatttaagttattataaatattttataaatgttattggggattttttgtttttttttaaagatggaaatattgaatataaatgattaaattgtgtaaatgtgtgtgggtgggggattaaggattgaatttttaaaatgtatatagtttatttaatttgttaattaattttaaattaaattatattttatattttgtatgggataggaagcgtttttttaaagtttggttaggatttgggatgtcggaaatttgagattttgttttttttttttgagatattttgaaattttgtttagaaatcgagtataatggttttggttttttagagaaagatacggatttgtaaaggtaaagagttgtattttttttcgagttggagtttttttcggtttttattatggggtttaaataaaattgtagttttatagtttttttgttggtgtttttttttttttggtgattaataaggtggaagagttaataagaattttgtgtgtttttttgtaggatttggaagggataggtggtgtgagtttgtttttatttagtttttttttttatttatttaggggtcgaggcgttttcgaggtagggggcgggggtttttatttttattgtcggttaaggtttttttagtttttttttcgttaaatttttttaagtaaattttttttttattgtggaggaaggaattttaagtagttttgtttttttgttagtacggttttaattggttttagtcggtaaagttaaatttggataaggtttaagggttttttatattattcgtcgttttttggaagaggtttttttttgtttttttatttgtaatttattatttttttagtttgagtttttttatttaggtttcgcggtttattgagatattaattttgggttagagtaagttttgatttgtaaattattattatttattttttaaagagttatttttagaatttaggttgtagggagggtaggttaaggatgaattttttgatttttggtgcggtgtgtggtggggggggttattttatattttgttttttgttgtttttttgttttgttttaggttttgaagtggatttattgtagagggagggttagggaatggttttgatgttttttttattttaaggaattttttagtaggagcggtttttattttaaagtaattttaagatttagttcgtgttagttttttagttatgtttatagtggtttgttaattagagatttttttagtttttggtaaatttgtaaatttataaagagaaagaaaagttttttcgtgggtgggtggatattggttatttgttataggttggaatttttttttattagggatgttttttaagtaggggttggggagggtagggtttagagtttttttttttttagttttttttgttattagtagatttgttagtagatatatagtagagtttagtagtgaggtaataataggggttgtgggggttggggtttcgttttttttaatttatgaaattatttgaaataataaaatttagataagggtttttggggtgtaatagggtggttttttgttaggtgttgggtagaaaaaaagtttttttttaatttttttttgttgtgtagattagttcgggttttggggatgttgtagaggttgttttatgtttaggttttttagagatagtagggggttggaggtacggtttgtttgggggtaggggataggtagggaggggtatatttttgggttatgagtaggagtttgattaaatgatttttttaggagggagaaagatatcgtatataattgtttgattatagttagaggggttggaaaggtgggggaaaggggtgaaggggttaattgttttaggtgtttttaatttatgtagtatttatttggattgataagagttgagagattggaattgtttttttttttcgtttttaggttttgttttaggagtttttttgtttaggagtttgggagttgaggaggtttggaagtagtgggtttatagtgttatcgttttgggaatttatagtgttttggatgtggttttttcggttttagttttgtaggtagtttatttggattgtatttattttttagaagagttgtttagaattttgtatgttcgaaagaaagattaattaaagaagtgaggaagttaaagagaggtttatgaaagtttatgacgtattttttaagtgtatattttagtaattttaaatgttttttgaagtaaggatggggatggatggttggataaatggatgggtgtatgggtgtgtgaatgggtgagtgggtgggtggatggatggatagatggatgaatggatgggtaggtggatgaataggtaggtgaatggatgggttggcggatgaatgagtaaatggatgaatgattggatggatgggtggatgagtagataggtggatgagtgaattggtggatgagtggatagatggatgagtggatgagtagatgagtgaatgggtggatgagtggatgggtgggtgagtggatgagtagataagtggatgggtggatgagtggatgggtagatggatgggtgagtggatgcgtggatgagtggatggacggatgagtggatggatggataagtggatgggtagatgagtggatggatagatgagaggatgggtagatggatgggtgagtggatgggtgggtgagtagatgggtggataagtggatggatagatgagtggatgggtggatgagtggatggatatatgggtggatagatgggtgagtggacggatgatgagtggatgggtggatgagtggatggttgagtggatggataaatgggtgaatgagtggatgggtagatgagtggatggatagatgagtgaatgagtggatgggtggatgagtggatggatagatgggtgaatgagtggatgggtggatgagtgaatgagtgaatgagtggataggtggatgagtggatgggtggatgagtgtatagatagatgggtggatgggtggatgagtggatgggtgggtgagtggatgggtaggtggatgagtggatggatagatgggtaaatgagtggatgggtggatgagtgaatgattgtagataggtggatgagtggatgggtgaatgagtggatagatgggttgataggtggatgagtggatgggtggatgggtgggtgcgtggatgggtgagtgagtggatgggtgggtgggtggtaagatgggtggataggtatatggagtttatttaaggagttttagaaatatatatatatttttttattttagattttttttaggaaaaagtagtgtgtatggatcgttatttggttatattttgagatagttatttttattttttttggaatatcgtttggggggatgtagtatagggtatttaagtaatttttgagtttagggtagagatattaggaagtagtaggtaggtcgtgatttcgtaggtttgttttatggtttttgttgtttgtattatggtatgaagtttagatgtatttttggatttggggttttgattagatggagttattaattttttgaagaatgaaatatataggggttatttttgttttttagttgtagggaatgacgattatttagttttttttttttttaaattttttttaggtttttgtgtatggttttgttgattttttttttgtttttggttatttttttagtttttgtcgttttttttttcgtttttatttacggagttagttttggtgttttgagagtttttttttttagttgattttatttagtttttgagtatttaatgttaataatgttattttttttgtttagatttatatttgagtgttagtttgatttatagacgtgtttttgggtttcgttgtgttaggttttttgttgggttttgggtatttgtagttattgttattgttaagttttaatatttgaaggtattttgaatttaatgatcgtgttttaggttgaattttggagtttttattttatttgttttttattttattttttatttaagtgaatagtttttttagttaatagttattgtagttagatttttaggggtcgggtttgggttttttatttttattatttcgaatttatttatttattttaaatttttattaatgttaatttaatatattttatagttattattattagttgtttttgttcgaattttttttttttaaagtattagggggcgtgtgtaaaatttattaatttgatgatttttttttatgaagtcgtgattggtttttattgtatttgggatatattagatttttgtggttttagaattttgtttattatcgacgtgttgtgtgattttgagtaagtaatttaattattttgtgttttaatgtttttatatgtgaaatgggataataatatttgttttataagaatgttggggattaaatgagatatttatttatgaagtatatagtgttgtgtttggttagtaaatgtttgaagtttttgttaataaaatatacgtttttaatttattttttagtttttatttacgtatagtttttttggttgttttttagtttttttaataaggttatttatagaggttttttttgtcgggattattttttttttatgttgtttttagaatttttatttgttttttcgggatagtttatttatattgggttttttagtttttgttttgttttgttttgttttgttttttttgagatggagttttattttgtcgtttaggttggagtgtagtggtattatttgggtttattgtaagttttgtttttcgggtttacgttatttttttgttttagttttttgagtagttgggattataggcgttcgttattacgttcggttaattttttatatttttagtagaaacggggttttatcgtgttagttaggatggtttcgattttttgatttcgtaattcgttcgtttttgttttttaaagtgttgagattataggtttgagatattacgtttagtttaggttttttagtttttatatacgtggtttttcgattgttgtttggggtttgtcgtatttattatttataaaattttatacgttcgaagtatttagtaagacgttgtgaatgagtgaatgaataaatgaatgaatggttagtttgttgttttttcgttcggtttttcgttttttttagattagtatgggggtagttacggttttcgtttatttcggtaatatcgttttttttgtgtcggtcgcgttggttagagtttttttttacggcgttttcgcggtttcggtgtgtggtcgtttgtgaatgagatttatgattttcggtttttattatttttttggagttataaagtattaaggcggaaggatggatgggttttttgggatagtcggggtgggaggtcggtttaggaaattttttttaggaaatggttagtgtgggatgaggcgttcggtgggaggggagtggagtggggatttggggtttggttgttttgtagttagggattttaatttttattttttttttcgtttattttttaattttagtgttgggtttagggtttttggggttttttttaggaatatagaagatatagtaaggattagggatataggataggtagagtttatgggtaggaggtttttagttagtatatttgagtttatgtttggttttaattagatattgagattttggttaggttattttttacgttgaggtaggggggttttttagaggttattggtttttaagtatcgcgtggaagatatgttacggagagttagtattttttgagatattagtagaaggttagacgtttcgcggtttaaggatgatttggttttagcgtttatttatttgtcgttttgtatgaaaagtttgacgtgatatggtcggttttagcggaagagtgattcgggaatcggtagagcggatttagtaattggtaaattggatttagtaattgagatattgttaggggtttggtagaagttttttaatgtattagatttagttttgatttttatagagtttagtcgagtattaaaaggtgtagaggtcgagttgagtattaggggaatattgattttagggttgatcggtgttgtgcgtgtattttatagtttatagacggtttatatttattcgatcgtatttgatttttttttgcgaggttttttttagatttttcgttttttaaagttattagttgtgttttttgaaattagagtaaagtaataaaattgtagtaatagcgtgtttttatgaacgttgtgatgttagttggttaaatgagggagtttttagggttttttatattgtttcgattttgtgtgttttttggttttggtttattttttatattttttgttttttttttttttttttttttcgaggatttagggtttggggttgatttattgtgggattttaacggtgattttttggaagaaatgttcgttttttttttttatttagtagtgatttttggttcgtttacgtttacgtagttaatataggtagtagtcggaatttggaagtttttggggtgggagtttgtttttttttaggtttttttagttcgaatttcgggaaggagttatatttatatggtaattttttttaaggttgggagggggaaggggtttggttcgggtttgattatttttttgaggttgcgtttattgggttttttaagttagttgggtttttcggttgtatttttgagggatggtaatagattatagtgtaaattgtttatcggttggttgggtagtgggtgtttagatgcgggttagggttttcgttttataggttgtgtggtggtttaaagtgggtatttttatgggtatatatttgtgttatagtttattcgtgtgtgtgtgtgtgtgtgtgtgtgtgtgtgtgtgtgtgtgtgtgtgtgtgtgatagtttagaaatatggtaatttatagtttttttaagacgttggttttgggagatttgtttatttgggggttttagtatttttagttttttttaggaaggttttgttttttttggtttgaagttggttttagggaagaatttttttagaaaaataaaagttattttttttagttttagtttagtttttttttaggggtgagttatattaaatttattttttttttttttttttatttttttttttacgttgtaattagttgtaagtggtttatttatttaggtttgttagtttattatagaaaagatattcgaattttgtattttttttttttgatttgttttgggttttaataggtaaaggaaattggaagttagtagttaggatttagttgtaggttttcggggttattttgcgtttttattttagttttatttatttttgcgttgatttaatgtttatttattttagtttatggagcgaggtttggatttaagataaaataaagggggttttggttttttggggtttatagtgttcggtgtcggcgagataattttagagtatagtatagagaaatggttgcgatacggattcgtagtatttggttggttaagtatagtaatgtatttttattaggtttgggttttttagtagatatatggtttaaaggttggttggttaaattatatgattttgtaattatttaagagaaatgaaaatatgtttatataaaaatttgtagattagtatttattgtagaattttttataatagaattatgttaaaaagtagaaataatttaaatgtttattagtagatgaagagatatatagtgtggtttatttacgatggaatattattcggttatgaaaaagaatgaagtattagtatttgttataatgtggatgagttttgaaaatattttattaagtgaaaggagttagatattaaggttatatattgtacgattttatttatataaattatttagaataggtgaatttatagagacgaaggtagatgagcggtggttaggggttgagagttcggagttgggaatggggattggttaatgggggtagggttttttttggggatgatgaaatgtgttgggattaatggcgatggttgtgtaattgtgatggttaattttttgtgttagtcgggcgtagtggtttatgtttgtaattttagtattttgggaggttgaggcgggtggattacgaggttaggagattgagattacggtgaaattttatttttattaaaaatataaaaaaaaaaattagtcgggtgtggtggtgggtatttgtagttttagttattcgggaggttgaggtaggagaatggcgtgaatttgggaggcgaagtttgtagtgagttaagatcgcgttattgtattttagtttgggcgatagagcgagatttcgttttaaaaaaaaaaaaaaaaatttttgtgttaattggattgggttatggggtatttaggtaatcggttaaatattattttgagtgtgtttgtgaaggtgtttttggatgagtttaatatttaatttttttattttttagaaagtttagtttattgttagtatttatttaattttatataaatacgttttttgaggttgaagtaaatttgattggatgttttgtgtgaaaattaaatataaaaattggttaggcgtggtggtttacgtttgtaattttagcgttttgggaagtcgatatgggttaattatttgaggttaggggttcgagattagtttggttaatttggtgaaatatcgtttttattaaaaatataaaaaattagttacgtgtggtggtaggtattttgtaattttagttaaatttaggaggttaagattggagaattatttgaatttaggaggtagaggttgtagtaagtcgagatcgtgttattgtattttagtttgggtaatagagagagttcgttttaaaaaataaaaaaattaaaaagaaaaaaaattttttaaattgtttttgtagttatttttaagtaaaataatagagttatttgagtcgtttattttggaaaaattagatttattaaatgaatttttagttaataattgattaagaataatgttaatattatttgtaggaatgttgtgttttttaggatttgatatttttagcgatcgagaattattatttttttttaaattttatttatttatttattttttgagatggaattttgttttgtcgtttaggttggaatgtaatggcgcgatttcggtttattgtaatttttgtttttcgggtttaagtaatttttcggtttcggttttttaagtagttgggattataggtgtttattattacgtttggttaatttttgtatttttagtagagatgggattttattatgttggttaggttggtttttaatttttggttttaggtgattagtttgttttagtttttttaagtgttaggattataggtatgagttattatatttagttgagaattattatttttttttaaaggaaatattattattaaaaatggaatgttataaatagaatgatgttttttgtttttaaagtcgatatattagagtgatgtgaaaataataataaaagtaagatatttttcggtaaatttattttggggtgaacgttgtagttataagtattgttggtgagtattttcggggtaaataggaaaagggtgtaattaggagtttgggtaaagtagattgtgtgttttgatgggggtgggttttattcgattagttgaaggtaatagggtttggaacgtatattttaagatatagtgttttggtatagtaaatatttttagttgaaggaatttaagaaatggtaggtttaagaagaatttattgatttgttttttttttgaagtagattataagttttttacgtaagaggtgttttttttatatttagcggaaaggaatagttttatttttagagatagaggatttgagaggggttttagtatataggttttgtcgagatttttacgggtttattgtttagtttattttttgttgttttgttatagttttttacgattttttattttttattaaatttagtataaaaacgtttaggtttaggttaggtatagtagtttatatttataattttagtattttggaaggttaaggtggttagattatttgaggttaggagttgaagaatagtttggttaatatggtaaaattttatttttattaaaaatataaaaattagtcgggtgtggtggtatacgtttgtagtcgtagttatttgggaggttgaggtatgagaatggtttgaatttaggagatagaggttgtagtgagtagagattatgttattgtattttagtttgggtaaaagataagtaaaagaaataaataaaaaaattgtttaaaataagtaataaataaatttaaaaaataagtaaaataaataaaaattgtttaggtttaggtcgggtatagtggtttatatttgtaattttagtattttgggaggttaaggtaggaggattgttcgagtttaggagtttgagattagttcgggtaatatagtgggattttgtttttataaaaaataaaaaattagttaggcggggtggtatatgtttgtagttttagttatttgggagtttgagttgggatttaagagtgggtttagagtagttttcggggtcggtagttgggttttagtttgagtttaggaagttaaggttgtagtgagtcgtgatcgggttattgttttttagtttggacgtgcgatagagtgagattttgttttaaaataaaataaaaatcgtttaggttaacggtttttttgggtttttatttttttatgaaggttcggtgttaagtaaaatttatttgaattgttatgtttgttttttgttaatttttgttagtttaatttttagggttttagttaatgaatttaaaatcgatagaaggaaagggtttttttttagattttgttttgattaggtttttgtaattttgtgataaaggtttgaaggtttgaataggaggatataaggtttgagtgagagagaatttttttcgtttaatcgtttttaatttggaatattagattttttttgttttagatttaaattgatatatgcgttttttttgggtttcgggattggaacgacgttattggtttttttgggttttgggtttttaggtggatattagagtcgtaatatgggttttttcgtgtttttagtttgttgatttattttgttaattttggtatttgttaatttttgtaatgaggtgagttaattttttataataataaatttttttatttaaatatacgtatatattttttattggttttgtttttttggatgattttaatataattattttgtgaatatagtaaaattattgaattgtagattttaaaaaggttaacgttatagtatgtgaattttatttttataaagttattatttaaatagtaataagaagttggtgagttttgtgtatttttttgtaaataagagtagggatagcgtcgtttttgttttcggatgtttttagtttttagttcgagtttaggaatattttttatgtgtttttttttttaattttgtagtttaagggtgggggcggtttttagtttggtattttttttgtagttttttattttttttttatattagttaatggatatagaggtttttttatggatttttatttttatttatttatttttatttttttgagatagagttttattttgtcgtttaggttggagtgtagtggtgtgatttcggtttattgtaattttcgttttttggatttgagtgatttttttgttttagtttttcgagtaattgggattataggtacgtgttattatatttagttaattttttgtatttttattagaggtagggtttttttatgttggttaggttggtttcgaatttttgattttaggtgatttattcgttttagttttttaaagtgttgggattagaggtgtgagttattaagtttagtttttttatagatttttaaaagggttttgggtaatatagattgggatttgttaagttattaaatgatttttttaaataaagaaggaagttataaatttttatttaaaaggagtgggggatggtaatagaaatatagttagttagaagtcggaagggttttatttaatttatttttaaggtttttgggtagaagggataagggaaaatttgttttttaaatattttattcggtattttatttttcggatgtaagatgtagttgtgtatagcggtagtagtgaggattttggtttggtaggtttttatattttttgttgagggttttaggggttagggttgtttaataggattaagaggaaatgattataggagtttttagttgttgggggtggttttcgcggttttttgggttatttttggtgaatttattttaaatttggaagaggtttaagttttttcgtttttcgtattttaaattttagttacgttagttaggagttttgggggatgagaaaaaatttaattaagttttattgtgttgggtgatataggatttagaaggagaggggtttttggattgtttaagtttaatgataattttagtagttgggtttttaagttaattagtttttttttttttagtagttttcggggagtattacggtgagttgtgaggagttagtttagtacggtatatataacgtaggggttttttcgtatttttattttataaatattagggtttttcgggggattagttttttatttttgagttattttttttttatcgtttttttaataaggaatagagaaggagtttttattgtttaattagatgtagaaattgacgtacgtatagagaggttacgtgtgatatggtttggacgttgttttttttaaattttatgttgaaatgtgatttttgatgttggaggtaaggtttggggggggtggggtttgggttatgggggtggattttttatggatggtttggtgttttttttacggttataaagttcgggagatttgattgttatagagtttgggagggttgggtgaggtggtttatatttgtaattttagtattttgggaggttaaggtgggtggattataaggttaggagtttgggattagttcgattaatatggtgaaattttatttttagtaaaaatataaaaaaattagtcgggcgcggtggtatgcgtttgtaattttagttatttaggaggttgaggttgtagtgagtcgaggattgtgttattgtattttagtttggttgatatagcgagattttattttaaaaaaaaaaagagtttgggagttttttttttcgttatgtgacgtgttagttttttttttattttttattatgaggaaaagttttttggggtttttttagaagttaagtagatgttggtattatttgtatagtttgtagaatcgtgagttaaataattttttagtttcggttattttttatagtaatttaaaatggacgaatataatgtattagtttttttttttggattttatagtgtgtttggttggggttgtgttttggggaaatggtaattgcgaggtttttatagatcgggttcgggttttaattatagtcgtattttagcgttttgatattgttgagtggatgtttaaaaagtattgttgggtgaatgtgcgagtgaatgatgaagatggaggtggttgttggtgttagggtaaggttttaggagtttggggaggtggtattaggtagtttaggttaacggttaattttggatagggttaggaggtagttagaatggttaaggatagttaagggattttaggtaagtggttttattttttttaggcgggtaggaagtaggaattagattaaggggtgttaggtggtagtggtatttagggggtttgaggagtaggtgtaggtttagtagggttggtggtgttacgtgtggggtcgatcgtggtttcgtttattgtttttattttttggacgtatgggtttatggtttttaaggtttttttttgtttttacgtttatttttttaggttttatttttagacgttaagttatttttttatttttatttttttcgttgtttttatatttgagttgattttttttttgagttttggtgaaattttagagagtttagaggtgtagtttatatttttgcgttataaggtttttgtagtttttatttttttgggatattttattttagagttgggtgtgtatttattttattggattagaaattttaggaatgtttattttgtatgtttttgttttttatttttcgttcgttatttagttcgtggttgttatgtggttgggttttggtagttatcgtagttggtaatatataattagtatttttgtgtttaggtttcgtgttgagtttttttagttttattttcgtttgtttttaaaatggtttttgatatggtaattattattatttattttttagataaaagattatagttttaggagaggaggaatggtaggtttgaggttacgtggttcgtaataggtaaatggattcggtagttattttattttcgagtggggtttttttttgtttgtagatttcgttgaggttttagagtttggagttagtgagtttttattgagtataaggatagcggcggtgtcggggttggaataaggtagggaggggttttttaaattatagttttggttgtggatttattttgggatttcgttttggttgggaattttgttttagtttattcgggatatttttttattttgagttttgtattgggttgtgtacggggtttgttgaatgagtgagggtaggagggatggtgagtagggtggaaagcgattatggtgggtaggtttttgttggaagtttgaaatatttttggcgagtaggaaaatattaggggaagaggttatagtttttagaagggttcgttggggattgttttgtagtttttttatcgggataggtagaaaatttagtttttttttagggtgagtttaggaagtttgtgggggtataggttttagttagggtggcgcgtgggtttatttaggggacgttgtcgtggtttagagttaggttaaattttatgtattttgtaaataattatttataataaataaggtttatttattttttaagaagagtaaaatattataggaggtatttttttattaattaaatacgttatagtgattttattgcgttattgagggagggtattagggtgttcggtttagagtaaattgtggttagggggacgggtatattgttaaatcggttagatttttatttttgaaaatgtgggttaaattttttttaataagttataaggaaatttagtgtgaattttatgtttttattattatcggttgttttggaagattgggaggaggggttttgttttttttttatttttggttatagggtttgaggttataatttggattgggattttaattttttttttggggaagaggtttatttagggtgtttgttaaggtttagcgtataaatacggaattcgtttaacgtttgtttcggtatttttgggttttttatattgggtttttttatttgattttttaagtagtgagagtgatgggatatggggcgtttttaggggagatttggggagatggagtaagttttttagtttaaggtgaggtttcgaggtatggtttatgtagtgatgttttttacgggaggtttgaggtatgattaggagtttggagatttagtagaggtttgggtatgggattttcggtacgtagttagagcgagggtcgaggttgtatggatgtaagtaggtgattttgtgttatcgggtgttatttgtgtcgggttttgtgtagtcgtttttattttattgagttttagggaggtgaggtaattattttaggtatatagtttcgggggtaaaggttggatttaggtgtgtttgattttagaatttaagaagataagtagaggagtttgagttttttgagatcgtagtgatggtttagtgttttaggatggttaggttggtttttgtagttttagttaatcgtgtttttttttagttatttagggttttagcgttggtttttgagatttggtattggttataggggtttatttttggttgtggatatttagtgttggttattgggatttggtattggtcgtggggatttgtttttggttgtggggatttagcgttggtttttgagatttggtattggttatggggattcgtttttggttgtgggtattcggtgttggtttttgagatttggtattggttatgggggttcgtttttggttgtgggtattcggtgttggtttttgagatttggtattggttatggaggtttgtttttggttgtgggtattcggtgttggtttttgagatttggtattggtcgtgggggtttatttttggttgtagggatttagtattgtttatggggtttgtttttggtttcggggagttagtagtgtttgtggggtttatatttggtggtggggatttggtgttggaggattttgatagtaaaattatagaggcgataggtaatagtaatttattagtatagcgtgtggtttgttttagttacggtatttttttttattttgtgtttttttattataaagtttagtgtaggtaacgaagttaagaggtggagaattcgtaggaggacgtatattatatttgtttttcgtgtggcgtttttgtattttgggtggttgagattttttgttttttttttaggttttttcgtgttaggtttgcgttgttttttttggtttcggtttttatttattcggttttttagttatagatagtagcgatttttttttttatttaatggggttattgtttagtttattattagtttttagggttggtagatgatatcggttacgggtagtgtttttttcggttttagtatataaggtataaaagatattattttgttttaagatttttttagttacgtggcgtatgggaagcggtgtcgggaattttttagggtagttttttgtttcgggggagatcgtgtttaaattttcgaggaaatgttgttttttggttttttttttgaaaaattttttaaggagattttgtgcggagcgtgtagggagaatggagatttttgtgagattgtttcgggatagttttatagaaattataaattatttggataaaagttgaaaatttgcggttatataatgttgattatttatttaaatattcgttgagtaagtatttatgacgtttgggaatttaggacgtggatcgataagatataatttttatgttcgttttagtgatagagagagagacggtattattaatttcgttcgttgggggtttttttggagggggcgtgtaggtttagggttgaatttgtttagtggatgtgttatttacgtttgcgtattttttggttttgtggtggtttttggaataaaggttgagagataaaagataaggatttgggggagggaggacgtttatgtatattttattggggatattagtaaggatgattgtttagtgattatttagtgatcgagttatttggtgtttggagtttggtatttatagagtagggcgggggtagtaggttttgtcgggggtataggtttgagaagggagtgttgttagttaggttcgacgggatagagagcgaagggttttttttttgaaggttatgtagaggtcggaggttaatgttagtaattttattaacgttagttttttgagatcgatttagagttggggttttaagagtagttttgggcgtttaggagttaagattttatagagggtgttttttatttttagtttagggaaagtgataaatttggagtgtttttgtttatggtttaattattgaatttaaatgaatgtattgataaatcgtatttagtgttatttatagggaaaagggagggaaaaaaaaaaaagaaagagagttaatcgcgtttaggtcggtcggttagggggaggatagatgggttattatttttgttattttttaggttttttgtattgattttttatttttagtaaaattaaggtttagttttttttcgtagtttcggagtcggttgggatgaagtaatttttgtaggtagattattaggtttattgtgatggttttagtagggaatttagtttaggttatagtagtttaggcgtttgtagaaggtttagatttttgggtgttaagttttttttttttgtattcgtttcggggttcggtggggtgggtagtgtgcgatttttagggttgatgaaagagaggaggaagaggttgagcggcggcgagtttgaatagttaattttgggaggggttgaggtggggaaggtttttattgttgttttataggtttcggagtaaggtttttatgattttattagtagttgggtaggtataggtttaggtgttgagtgtgttaggattttcgttgttttttgggtgggggcgagagggatttttatgggtttgtaattagattcgcgtttttttagttaattttttattaaataaatttatacgtatagcggattgggtatggtcgttattttcgggagtttttttgggaaagttttttaaggttttgttgagtttcgggaataggtttttatttgttcgggaatcgggttggtatttaataaataaattaaagttcggcgtcggaaggtagaattttgggattagagttttagttaagggttataagttttttaggaagttttttttttaaagagtggttgtgggacgttgggagtttttagggtggttagtttttaggtttttttaaagtttaggtggtatcgatgttttgtgttaaggtgagggttgtagagaggggtcggcggggaggagtttttatagtttattttggttattgattttatttttaagtattgaaataaagttttttttttatattttcggttagggagagagggcggaagttttaaatattcggggtgtatgggaaaggtttatatgtatagaagaattagataacggaagttgttggtggtggtgataggttttttaaaggggttttgagatttttgatatcggtagggaagttatatattgtattaggtttgggggtagggagaaggggtttttaaggacggggttgtttttttttgtggaagtgtttcgtattgtttgataagagtagtttggattagtcgtggtataataggaagttgggagaatacggtggtttaggaggttggttagggttggggagtggttaatttagagattttggttgtttaagtgggtttagggttttcggggtgaaagtttttgtggagtatagtggatttagtgttcggaggatagattttaggtttagataaggttttttttttttttttttgagatagagttttatttttgttgtttagattggagtgtagtagtataattttagtttattgtaatttttattttttaggtttaagtgatttttttgttttagtttttcgagtagttgttattataggtacgcgttattatgttcggattagttagtatttttagtagagatagggttttattatgttggttaggttggtttcgaatttttgattttaggtgatttgtttgttttggttttttgaagtgttgggattataggtatgagttattgcgttcggttaataaggttatttttgatatggaatgttggtttgattatagtgtttgatggtttttgtttgtaattatgttttcgttttttattaaagtagggtttttagggtagaagtcgtatttttttattttagagtgttttacgttattttttaggcgtatatagtgggttttttttatcgtagttgaattggttttattattattataatgatagtttataggggcgggggttagtgggaatataaagtggttaatgtaatagtgttttagttatttcgatatagaaatggttaggggatagaaggggtaagttgggagttagtagtaatttaggtttttagagacgagtattaaaaaaggcgagttatattataggttttttttgattatattttagtttaaaagagatttaaggagaaataagaattttatttttttaataaggattcgtatattagatgttaagtaaatattttttttttttttttgaaaaggagtttttggggttgtcgggggagttggttaaagagaatgatatttatggaaatatacgtggttttattaagttttaaggtaaggtggtaatgaatggaggaggaaaatttatagtattattagggaatggggtttttttttgttttttttttttttaacgggtttttttatgtgggatttaaattaaattttaattttattttgatttagtaggtgttgtttttatagtttcgaatagatttgttagaaaattattgtttaatttgttttcgggtggtatatttttttttaggaaaggaattataaatttattttagatgagtagagagttgttttttaaatttttgattaaaatatagtagattttatatgaaaaagtaaagagagaggggttagggatgaagtgtagtaggttggaggttgagttagtttttagagttattgggacggcgttttaggagtagatggtattgtttataaagtttttcgtttttttttgttttgaggtcggggattatttcgttggttgtatgatttagtttttggggtttttttagtatgaaaagattttttgaaagtaggttcgttagggagattttttagtttttgtttattgatatgtttttgtatggtcgatacgtagtatgttattgtagagaagtaaagtatacgtagattagtttcgttagtagtatttttttttttcgttttttttaggaacgttttgtatatatttaatatatttaggaatttagagttgcgttgtagtagtagttttttggattttagtgtcggcgtcgcggggagtttcggttacggtatttcgagtattgagattatttttagtttttagttagtcggttttcgggagtttagaggggtgataatttgagcggagtgattttagagaaagcggtggttaattcgaatttttttttggtttttttggaagttagggaaattttttgcgaaaaggaaatatgttttaagaagtttcgggtagtaggagaatttagttatttagtttagttggttaaatatttataaagagatagttgtgattatataaagttttatttttttattttgaggtcgaaaatttggttttcgcgtggagatcgagtttttcgttattttttttttggggatttcgttcggttttgtcggtttcgggtcggggtttagggatagcgtggttttcggtatcgttattatggttattagggttcgtttcgcggtcgcgttatttgagagttttcgagttagtggtgtaaggttgggaagaataaaggagtaggatttattttagtagcggaacgtcgggttgcgttggacgcgtcgagagtcgcggttcgtttatcgggttatatggtttagagtcgagtagaggattaaaggggttttgtggtcgcggaataaggagttttttagagcgcggggtagaggtagggagggatttcgattgtttgggaagggaggttcggtggggaattgttttaagggggtagggcgaggggagtaggaggagggggtaggtagagataggggcgtttagcggtaggttcggcgtagaagtaatttgaaggtacgggagggacgttaaggagttgttatacgttaaaggaaagtgatagggtttttgggaagagtgagggggagttgttaggaagaagagaggggaagaggtttttagggatttttggttatgtcgtttttgtttttgtttttgtgtttgttagaggcggtgttcgtgaggagttttttttttttagttaggttttgaaattgatttggatattttttttttttgtgttttgtttgatatttttgttttttaggtgtttttttatttatttgtttagatatcgttatagttgggtttttagggagtatggttagttattttagaaagttatttagatttgtagttagggttggaatatagttatttgggtttgttttttttattttaggtgtttgttggttgggattatggaagggagaaggagtaggagaggaggggtaggggatgggggcgtagtttattttgagtttttttttcgagagtttttggatttagatttgatttagtttttgtttttttagtttttttagtttttgggggatttggttagtgagttagtttttttttttttttttttttgtaggtttgggatgtgttgggatttagaggggtataagtaagggggtttttagaggagggagttgatattataggggttgggtttggacgttgggatttgttagatttattttagtgttacgatttttgaatttaagtgagttatttttagtaggggcgtggttatttttatattaggagagagcgtttgggagtgggttcgtttcgagggtttgttgggggttgggagggatttatttaaatggaaagaagtttttggtgatattttttgagggttaggggttgaattttggaagttacgtttttaggtagtttttacgggattttatgttgagtgttgattgggttttatatatttttattttttttatttcgtatttttatacgtggttgggggtgattgaagtttcggggtattcgttatattggttaaataggttagttacgtttagcggttttttagttagtagttattggtatttgattcgtcgttttttattttttatggttaattttttttttaaggttttttggttttacggttttttttatttttatagtgaacggtcgtggggagttgttgttattggttttcgggcgttaggttagagtcgggggagtgtttgggagaagattgtatgttcggagtttttgtttttatttgaatgggagggaggttggtggtagattagagatttgggttttgagttaaatattgaaatttaaggttttgggtttgttatttaatatttgtggaatttgattttttttatttataaaatgggtattattaatattagtcgttaaaattatagtaagatatatacgtttaggttaggaagtgcggttatttagaaaatatagttttttttttttttaagaagttaatttttttagtattgggagtgagaagagtttgttttttttattgtttgtagtttagtttagggtatttttattattggtttttaaagggtagttttagaaatcgttgataaaggatgttagaaggaatttttttttggttaggtgttagggttaatagaaagtttcgaggatgtagtttttattacgtttttgtttcgtgggttttttttttttcgtgggtagaattttttttttttggttttttttttcgaatttttttttttttgtttttggttttaatttgttttttagttttttggttttttaggttttttttagggtttaagattttgtttttttttaagtttagttttttttttttttttgtttttggatttttgagttgggaggttagtattttgggtgttttgttgaggtggtcgttttttttgtagtggttttttttgttgttattaaatgagggtttttagagtatagagaaggtattttcggtttggggttgtattttttatataaagtttttgttttttagtattttttaaagttttttatcgtttagtatatatttagtatttaggtagagtagttttagagttttttcggttggttttcggtttaattttttagtagaaacggtatatgggttatagacgtaattttatattttttagtatttataataaaaaatgtaagaataagttaggtatagtggtttacgtttgttatattagtattttgggaggttgaggtgggtagattatttgaggttaggagtttaaaattagtttggttaatatggtaaaattttgtttttattaaaaatataaaaattagttaggtatggtagtagttatttgtaattttagttatttgggaggttgaggtaggagaatcgtttaaatttgggaggtaaaggttgtagtgagtcgagatcgtgttattgtattttagtttgggtaatagtgtgagattttatatttaaaaaaaaaaagaaaagaaaagaaaaaggaaattattaaaaaatgtaagaataggtgatattaattttaatattatttatttaatagagtttaaaatattattaatttaatatgtaattaatgtaaaaatgatagatatttgatattttttttttttttttttgttaggattttgaaatttagagtgtattttatatatacggtatttttttatttggaattattatattttaggtgtttaaatggtttcgtgtagttagtggttattatgttggatagtgtagttcggagagttttaatttttttttttttttttggttgtcggggaatagagttttgttttgttatttaggttggagcgtaatggcgtgattttggtttattgtaattttcgttttttgagtttaagtaattttttcgttttagttttttaagtagttgggattataggcgtatattattatgttcggcggttattttttgtatttttagtagagatggggttttattatgttggttaggttggttttaaattatagattttaattgattcgttcgttttagttttttgaagtgttgagattatacgcgtgagttattacgtttattttcggatagttttaatttgattttaggataatattaggttattagagagttgttgatttggattatattatgatttgaattttttagattattttcggtattatgtttataagttatatttagaggataataggatatagtttggtgaaatatatagcggtattttttataagatattggtgaggttatagattttattattagtgttattcgtttggggatattttatttttagaaaatgtagagttttttttaagaaatgaatgtggttaggtgtgttggtttatatttgttattttagtattttgggaggttaaggcgagtatattgtttgaggttaggagtttaagattagtttgattaatatggtgaaatttagttattattaaaaatataaaaattcgttaggcgtggtagtgtgtgtttgtagttttagttatttaggaggttgaggtaggagaatcgtttgaattcgggaggaggaggttgcggtgagttgagattacgttattgtattttagtttgggcgatagagcgagatttcgttttaaaaaataaataaaaaaagaaatgaatgttttaggtatacgttaagtattttttagacgattttaaagatattaattattgtgattgacgacgatttttttttttttttgggtgtgtttgttttgtttttttagtttataggtgtttaggatttaaaggtagttcgttataggttatgggatttggttggtttaaaagggagagtgaggttattggaatttttttaggagtgagtttgaagtttggaatgttttttggtggagggttttgaagttaggaggcgatgtagacgtgggggttgagatattatttggggttatttgtaaagagggatatttaggtagtgattttaaggaaagagtaaggggaggagagggcggtatatttacgtttttttaatttttgttcgttcggaggtttacgtattttatacgtcggttttttcgtatggatatttttttaataagtaatttatcgtgtttatgtttatttattttaaagttatatagaattgtatttattaaaaatgaatttatggagatagaaagtattttggtggttgttaagggttggagagggcgaatggggagtgagttttttatggatacggggtttttttttggggtgatgaaaaagttttggcgttagatagtgttgatggttgtacgatattgtgaatgtatttagtgttattaatggtaaattttatgttttgtgtattttagtataataaaaaaatatatatttaaagtaatagaatttaacgtgtttttttttttttttgagttagtttgtttttttgttttatattttaaaattagaagggttttgagatatattataggtttttagggtaggttgaataattttttttttttaaattgtgttattttatgtggtaatagggattttgtagatgtaattgaagatgttgagatgaagagattatttaggtgggttttaaattataagcgttttttaagagggaggtaggttaggtgtgatggtttatggttgtaattttagtattttgggaggttgaggtaggtagattatttgaggttaggagtttaagattagtttggttaatatggtaaaattttgtttttattaaaaatataaaaattagttaggtgtagtagtatatgtttgtaattttagttattcgggaagttgaggtaggagaatcgtttgaatttaggaggcggaggttgtagtgagttaagattgtgttattgtattttagtttgggtgatttcgttttaaaaaaaaaaaagaggaaggtagagggagatttgattgtagagaaggaggaggttgtaggaggatggaggtagaggttggagggatgtagtcgtaagttaaggaattttagtagagttttttatttaaagttggaagaggtaggaatggattttgttaatattttgattttagttcggtgagattgatcggtttttgatttttagtattgtaaaggaaggagtttttgttgttttaagttattgagtttgtgataagtagttatagcggtaataggaagcgaatgtagtttttagtttattttttcgtttatagtaatataggcgtttttttgtgtagaattttgttaggtagttagtgagcgggataggattttttttcgtttttattcggggttttgtgttggattttttaaggttgttgtttttgagatagtgaattttttatatttatagagatttattttaaagttgagaaagtgttttttttaaggggcgttagaaagaaggttttaaggtgtttttgttatatgtttatttgtttgtgggtaatatttatagttttttttcgtgatttatttaatagaagggttataggggagggagtattattggttagtttattttatagtaaggttttattttggaagttataggggatagttgggatttttatttttaatttagttaattgggagaagagtttagaatagttttggaggttgatatttgttaggaagtgtggtgatatttacgtgttgttgaaatatatagtaatatagtagtagagaggaggggatgtggttttatagttttttttttatttatttagtacgtacgtatatatatatatacgtgcgtgtatatatgtattaatttttagtttttaggttttgtattttgtttttgttaagtttttcggttattattaagttaggttgtgagtatagagtttagtttttttgttaatttttttttaatttattttgggtaatattttaatgggatgtagtagatgttttttattaaatgttaagagtaatatttttttttattttttgtgagttggcggtcgcgtttttgtatgggggtgcggaggaaagggttggggagtaggaatgtggttttgagggttggtatgtatttgtagttgtgacgtttcgaggtagtttatatttttatttatagattaattttgagaaggggttgggagtatttatagtttttgttatttttgggttggtaggttggggaaattttgagtagttcgagtgaaggtcgtttttaggtaggtatggtgggatagaggggtttttgtatattttttgtgaggtagcgtagttgttgggttgttttagtatatttgggtgatatgttttttttttggtttttttttatttggtttgggagaacgtttaggatgttttaattttaaaaataagtaaattttttttttttgatttatttatttttttaaattgtgaattttttttttgtttgaatagtttaattttttaaagtaggtttatattacggtttttagttttttatcgtttatttattttttagttcgagttatttggtgttcgttcgttttattattaatttagtttttgaaaaaatttttatggttagtatttagttttattttatttgatttcgagggtagtgtttgatacgtattagttggttttttttttttttttttttttttcgtattttttagtgttggggtttagatagtttttaagggttttttcgttttttgatttagttttttggagtgattatattttcgttttagttttttagtttagttgtttttttatattttgttttaggttttttttttggaatattgtttgtttttagagatttaagtttttattttttatattttttttttcgatttttagtttttttattaaagttttattggttgttttttttcggtgttttaaattagtttttttttgtttagattttataaggttagtttttattttatgattgtttttttggattattgggattattttttattaatatttattttttatttcgtttttttttgtttatgtagggttttgttggaggatttttttcgttttattatttttttttttaaatagttttttaggtttttttgttaaagttgaaattttttttttgtattcgaggatttttgtaatttggttaatttatttttaagtttgaatttttatttttgtttaaggagtttacgttttttagttaggttttattgtttcgtaaattttatttaaaattttttttggtaaatgttattatttttaggaagtttttttgatattttttattatatgtgatttttatttttagagttagattttgatttggagattttgatttttatttatttttgttttttttgagttttttaggttgtaggttttagtttatgtttgtgggtttttgtagtaggagggtttatttttatttttttaagaagtgttcgttttatttttcgttaagttgtaattttttataagtaggtatttttaatatgtttttttatttttttttttttttttttttttttttgagacggagtttggttttgttgtttaggttggagtgtagtggcgcgattttagtttattgtaatttttattttttaggttttaagtgatttttttgttatagtttttttcgtagttgggattataagtatgcgtcgttacgttaagttaatttttttttgtatttttagtagagatagggttttattatgttggttaggttggttttaaatttttggtttgaagtgattcgtcgattttagttttttaaagtgttgggattataggcgtgagttattgtatttagtttaatatgtttttttatattttttttgaaaagttattattatattaatagtgtgttttataaattgataataatttaaaatgtgatttattattaaaagtgtgattttatttttaaataatattgttggttgtggtttgtagttagttttattattttcgtgtgatgattattttgtagattagtaatggttttaggtttatatttaatttaattattttgtttttttaattttatttttttttgagttaatattaagtgtgttttagagttgtaaatttatggttgatataaaattaggatttttaatatttaatataaagtaatcgggttttgtattggttttaatagtaattataaattacgtttgttttttgtattgggtatattgtatttagtttataatatgtgtttttgttttttttattttttttattaagatggtatataggtttaaatttgttttttgggagtaattgatttttttttggaagatgtgagtagtttttatattatatttaagaagatattgttataagattttatattttttattttagtttttaagggtttatttatttttttaaaaatttatttgttttgttataatatgtgtttttttttttttatttgtttttttaagatatagttttattttgttgtttagattggaatgtaatggtatgattttagtttattgtaattttcgtttcgtgggtttaagtaatttttttgttttagttttttaagtagttgggattataggtgtgtattattatattcggttaatttttgtatttttagtagagacggggttttattatgttggttaggttggttttgaattttcgattttaggtgatttatttgtttcggtttttcgaagtgtcgggattataggcgtgagttatcgtattcggtttataatatgtgtttttatttttttttttttttttattaagatagtatacgggttttaagtttttttttttttttttttttttttaagattagttggttgggtgtagtggtttatgtttgtaattttattattttgggaggtcgaggtaggtagattacgaggttaggagtttgagattagtttggttaatatagtgaaattttgtttttattaaaaatataaaaaattagttaggcgtggtggtgggtgtttgtaattttagttattcgggaggttgaggtaggggaatcgtttgaattcgggaggcggaggttagagtgagtcgagatcgtgttattgtattttagtttaggtaatagtgtaagattttgatttaaaaaaaataaaataagtgggaagaggggagatagtggaataaggagtttaatttgtaattgattgtgaataattaattgagataatttattattttcggattagttacgggttttattttttatttgtttttttgagttacgttttttagtgaaattttatacgtatgtgattaaatttgtttttttttttattaatttattttgagtgagtttaatttatagatttttaaatattgaatttaagagggtagaggaaatgtatttttttttcgttataaaaatattttatttttttattgtagtgtcgtttgttttatttatagtcggtaatttggatttcgttttttaaagtttatgaaagtaggatagattgtttgtaggatgttttcgttataaaaggagggttaggtttggtaggaggaaagaaacggaagtggtaaacgtttattttttgcgttagatagaggtattaggtgtttattgttttggggagtaaatatttttaaaaacggaaagaaaaatttttagttttattggggtgtaaaaagttatgatttttttcgtggttaaatggttgggtggtttgggagataagcggtagttattttgaagtttagtttatttgtttgtaaatggagggtaatgaaattatttgttgtatgggtgtttgataggttgttgtttaaattttttgtttttttttatggggttttggggaagattatatgagttagtaatataaaagtattttgaaaattatacgaagtgtttaagtatgggggcgttggttgattttaggtttgtttttataagttggtagaaaattttttagagagggttttgttttttttttcggggtaggggtcgtagtgttagatttgatggtattggtggttgtttaggttatttggtatgagattgttgttagttttagatttattttaagtttgggagggaagtaggtcggggtgggggttttgaaattttttatatttttggtagagatattagggtaggtaaaagtgttatttatggtaaattaagaagtttgtttgaattgggtttaaattagtttagtttagaatggaggttagttttattttttttttttagaattaggagtttagtatattagaggttgagaaaacgttggaatagtttttttatttgtttgtttagagatagggattttaagttatttttttttttagtttattttataaattttttgtgttagattttttttgtttaggagttataggttttatttgggagttatttagggttttaaggtttttattatttagttgtttattttattaggttaggtttgtaggtatggagattagtaggatgtggtttaaatttggttgtacgttgattagttgagtgattttgggtttattttttaatttttgggaggtaatgtttttttatttgtaaaaaggggaaagggtttagcgaggagagtgataagtaaaggagatggtatttgtgtagacggtattgtgcgggcgtttagcggatgattacgcgttatttttttgttttttttttttgtttttgtgggagcgtgggtagtagggagttaagaggaagggagtagttgttcgtttgggacgtaggtcgttttgaattggaagagaaaaaggaataagtagtagttgtttattgataagttttatgtatttgtgttttaaaattttaaaggtgtatttgaaagattttttgggtaaatttttttttatagatatacgaaagttaggtgtagtggtttacgtttgtaattttaatattttgggaggcgaaggtaggcggattatttgaagtcgggagttcgagattagtttggttaatttggtgaaattttatttttattaaaaatataaaaattcgtcgggcgtggtggtgggcgtttataattttagttatttaggaggttgaggtaggagattcgtttgaattcgagaggtggaggttgtagtgagttaagattgtgttattgtattttagtttaggtgacggagcgagattttattttaaataaaaataaatttaaaaaaaaggtatatgaaaaaggtaaaatgttatgagtgttttgtcgtaatgtgttagttataaatgggaattggaggattttttaagttatttttttttttattttttttttttttgtatatgtattaatagttttttgggtgttggtagtattaggggatttggggtgttttataggttttgtttgtttagattttagagttaaggaggagatataaaagttaaaatagggtggtaagtggaataaatggggattagatggggtaatttggtagtattcggtaaggttttttttaatgagtttttaaagaggtttagtttttaggggaaggaggcgttttaggtagcgggggtttgtagaggcgaaggtttagggcggggtttttagggaagtcgtttaggatgttcgaaaggaggggagtaatttacgagtttggtgatagggtcggttataaagtgttatgaagtattaattaggttgtttattagtttttaggatagaaagattatagtagttaaggtgtggggatttgtttatttgatttttatttagtttagaaaatgattgttttagggttataggtaatagtttaagttttgtaagttgttggttatagggtgtagttgcggtaaggtggggacgtttattagttaagttttttaggatttttgggttgtcggatatgtttgtaggacgttacgggggtaggttagattaggggtatttttatttttttttttaggttttagtttttaggttagagtgttttttggtttttggggtttttagggttgtagatagatagggagaggtttgtgttatggtgggttatttggtttttgtaggaagtggttagaggttttagtatttggatatagtagttatttttttaatttttgttaatgttgttgttgttcggggtttattttttttaatttttttttttaattagggaggaaagtattttggagtaggaattgggttatttagtttgatattttagtatgattttgtatgattttgggttagttatttaatttttttgggtttttatttttttatttgtaaattaggtagataattttttaaagttttttttagttatagaattttaagtgttaaaataaaaaaaatttataaaaaggaaatatgtgtttagtttatattttcgtttttatttgttaaaaggggaaatggatttgttacggggttttttttttttaaatagatatgggagattttttttatgattgtagaattggagtagtttagaggagtttagaattttttagagtttgagatttataggggaatttattttaattttttcgggatagaagtattgttgtttaatggtatttaatttttattattgttgtagtaaatgattatatatttgtgatgttaaataatatagattagttttatattttattttattaggttatagggaaggtgtttatagggttgcgtattttttcgaggttgtaggggagattgcgtttttttgtattttttgtttatttgtattttttggtttgtggttttttttttttttttaagttttttttattgtattttttagatggtttattgcgtttttaaaaatttttgtgatgatagcgggttcgtgtggattatttaggattatttttttattttaagattagttgattagtgattttagttggttttgttatgttatttaacgtagttttaggtgttggggattaggatgtgtttaattttgggagttattattttgttaattttaagatataggttttggagggagatgaagggtaggattataggtttaggaggttgtttgcgtgggttcgaattttggttttattattaaggaattgggggagtatattatttgtaaaatgggggtcggcggggaattagttttttggttgttagcgtagagtgaggtagtgtgtgtagtgtttggagtagtttcgtgagtatttgtttttttttcgttaaatttataagaattgatttcggtttaacggtttttttaaatttttagtttttttcggttataaggttaggagtatttttttgtagggttatttaagtttttagtttttttgaaagtttcggtttatacgatgttggaagtagatgtgtcgtgggttgtttatttatgtatggttatcggagaggttcggatgatgtcgtttttaatgggtgtatagtgtagggtagggttaggtattaataattagttatagttattagcgtaagtaaggggtttttattgttatttttggtttggggttagggagaagtttcgggaggtatttgatttttttatagggagtggggttataggagaatgtattcgaaaggggttggggggtagtagaaagttttttttagaaattttatttttggttcgtgatagatgatttttttaggttattattggggtttatttgggtttttgtagtatggagtttggttattttagaaggatgattgggtaggttagggttattggcgatggtgacggtaggtttttttgaggtttttttattagaagtattaggaggttagagtagtcgataagtttttatttggtttttgaggggtagaaggttttgagtagttttttgatttttcgaggtttttttattttattgagagattttcgagagtattgagagttattttttggttttttcgtgagagagttggttatataaaggtagttatatatttagtaagatgaatttataatttttgagtttaggtttatttcggtttttttatagggagtttttgggggcgtggggtgggggtgtagaagggaggggtcggtgttttatttttgggaattaggttatgagttttggatttaggttaaattatagaggttttatttttttttaggttttttgttttttaattatttttgtatagggtatttttttttttttcgtagggttttattggggtggggtgaggaggagttatagaattatagtagttgttatacgggggtgttaaggtagggatgttgatgttaatcgaatgggtacgggaaggtagagtaggaggtcggcgttttgggtttggttaggttgtgtgattttagggaatttattttatttttttcggtttttagttttttttattgtaaatcgagggagtgaggttaggtgatttgtataatcgcgtgaatttgtgttttgtattttttatttattattttaaataatgtttttaaattttagttttttaatgtttcggtatttttttgtttgagaaatatttacggttgttttttatgttgtgttttaaatataggtattttggtttttttttgggtgtttttattagggttagaatgggtagtttattttgtaggaatttttaaggatttttagttatttttaggatgggggttggttgttcggaagcggtttttgtttattttcgtcgtagtttttattacgaggttagtgtagtaaaataggaggtgtaggtggtcggggttaggggttaggttattttttttagcggggtaggagaggggcgagaaaagttggatattgattattttaggttgagggtttgcgtggaggagggggtttatggtaaaggaagtgggaggatgggaaggagtttttgttggatatttttatttcgttggttttagtttcgttttcgttttatttgcggggagaaagtgaggttttttgttttgttaaattttagtaatgaattttatatttattttattttttgtttattggaaattttttttttattttttggattcgttttgaatagttgggttgtagaagtcggtggaatgaaatatgtagggtggtttagaggggattgtgtcgaatagcgttgtgttttcgtttatttttttttttgaagataaggtttttttgtttttgttttttttttgggaaagttggagagggggttgaggaaatgggatttattattaattttttcgtgtacgttggtttttagtaggtatttttatattttttaattaggttcgtagggtggaaaggtagtcgtcgagtttaatttaatttttatttagtcgtggaagttagtgtggatggtaaagtatttatgtataaatatatatacgaggttgaggttaagagaatacgcgtttagtttttttttggttttttagtaacgtttttatgttttagttttgttttaagttttaaacggtgtaaggtttttttaggtggaggaatggaagtttttaagaagttcgtgttttagggattatatagaggtagggtttaggagtaaaggtttttagatttcgtagtgcggcgttggtaagtttgcgttgttgtatttatattgttttgggatgaaggcgatatgttgattttttttaggtggttgtaggatagttaggaggaggtgagatgttagttaaaggtagttatagataatagtattacggattattagaaacgttattttcgtgttaaagcgttcgttttttttagttgttttattttgtgttaatattttttgggagtgatatgtgtgagattgggttgtgttgatgagtgattattggtatttttagattatattaaggaggggttattttgttgttaattaggtgtagggtaggcggtattggggtacgacgattcgttcggtatggttgttttatttttttttttgtttgagtataggttggtaggtttagaggagaggaggaaatagagttattatggggggcgtgtttaggggtgagttattttaagaagttatagaattagggtatgggagatattgtttagttttgttattaatttgtcgtgcgaagttggttaagttattgtatttttttgggttttaggttttgtaattagagggttggtcgaagaggtaaatgatagtggttagggatgggggtattgaagttagatttttcgtattcggattttttttttgttatgtttagagggaggtttgggtaggttatttaatatttttgggttgtgggttttttatcggtgaaatgggaataataatagaattaattttatagtgttgttgggaggattaaaggggatatttattttaggtaaagagtttttaagatagttcggggtttttaggaagtttttgttattattatcggatattattatttttgttacggttgttagggtttcgtttagtatcggtagtttgatgtcggtagaggaagggtgaggtttttgtttttttgtagcgttttttttttttttttttttttagttatggtaataatagttgaagtttatttttagttttagcgattggttatttttttgaattaaggattgaaggttttaggtttgttatttaaggtttaggtgtaagaggggtgagttatcggtttttgtttttattatatttaggtttttatacgtttttttaaataggtttttgttttacgtgtaagagaagatgttaatttttacgtttggggcgggggtgtttataaatgttttggacgtgagttttgacgggggttatggtgtaggttttgttagggtatttttaattataggggattatttgtagtttatagagggttttttgtaggttaatgggattttgttattttggttgttattttgtttagttatttggtaaggaaaataggttgtagatttagaggtagtacgggtttatatgttagcgagataatataataagggaaggatgtgtaggacgagggagttatggagattttatcgtagttttagttatttattagtagattttgtgcggacgtcgggtaggttattttattaatttttaggatgtttttgtaggttttgcgggtggatagggtgaacggaggtataaggagggtaagtttgataggggttggggttgggtttggagttagaattttagttagttttgttatcgtattttagggtatttttcgtagatagtaggttaaagtaaggttgtttagattaaaggggaaggggttttgttttttttattaagggttttttggagattttaatatagatttttagtttatagatattaaatttagggtttttgagaagtgagaaatgtgaaaaacgtatagaatagttgtagtttagcgtttttaatacgttagatttatataggtatatatagcgtttttgtagaggttagaaagttttgtgttgggaagtttttcgatcgggggaggttttatagtaagtttttttttttgtttatttattaacgggcggaaggttttaattaggattatatgggaagggttagcgggaggggtagagagggaaaatgaataggtaatattaagtgtttggggcggggggcgtaggggatatttaggaggggagggtaggggtgtattttttatttaatttatagggaacgggggttcgggaggtgtaggagaaggtttcggtatttttatttttttttttttgtagatttatttatagtttgtttacgggtagttagatttagttataggttagacgttcgttttagttttatttttttggtttattgaaagtaagttaggatagtgagggggacgatgttgttattttcggtatggttatgttgggtttcggggtgggtgggaacgtggttggggcgttattttttttggtcgttataggtataaaagttttttcgtgttttagtgttatatgtgggttttttttttgttgttttaataggacggatatttaagtagattttgttggtcggggggggttttcgtatttagttttattttgatttagcgaattttttttttgttttttggggtaggagttattaggtcgggttttaggtaatggttagtgaaggggttgtatggaggggttttttaggtttataggaagggaggttttttttttttgtaacgtggttgtagtattttgtgatcgagagggatattacggttggagatggtgggatggaggattttttatagtattttcgatgtttagaatattttattttgtataaaaaagttttaaatttttttgagggttgaagttatttagagttggggtttttgttttttaggttaaaagtattttgtcggagtagttgagagtatagcgggaggggaggggtaggagggaatagtttcgttacggcgataggggattttttgattttaagagggtttgtagatattattatttatttttagttttgaattgttttttgttaaggggttagaaatttttgggagggggattatagggggtttcgtttatgagaatagtgattgtggttaggttatagtttataagttagtaattttgtttagtcgtcgcggtggtttttttttgatggtttttagaaaaagcgttttattttttgttattagtgttttgaaatttaagaatattttttaaatagtaattgtagtaaaagttaatgttgcgtgagtgtcgtaggtattatttttagggttttatatatttttcgtttagtttttataaaaattttattttattttttttttcgttttttttttttaatagtttagaaaacgagtacggaagggttaagttggtttgaggaggggttggtggaatagtttgagggtttagtttttaagaattttatattgtaaagggaatttttgggttagggagtagggtatagtttttatttttttattttcgtttttagtattaggtttgatatagacggggtttcggttatgaataaatgaataagtgaatgagagtttgttgagggaagaaggtgatagggataagggagaaataaagtagttaatgtcgtcgtgatgatgacgatgttaacggtagtattgatatgtgggtttttgttatgttaggatcgttttaagtattttgttttatgaatatttttgttttttattatgtttcgagtggatatttttattagtttattttatagaggggaatatagttgagcgtattggttaaggttatgttgttaggaaaggttagagtttaggtagtatgtggttttttagtcgggttttggtttatacggttttataggtagttttatgaaatacgtagagagagtatgtgaggggtttttttgttgttttttatttttagttggggtttattttttgttgaaatttttttaatttgtttttaagtttcgttagttacgaaatatttttttgaatatttagtattatttttttatggttatttggttttatttttttatagggtaagttttgggcgaaaagtagaaaggatgaaaatttttgagagaggtgataacgtggtaatttttttttttttttttttttttttgagatagtattttattttcgttgtttaggttggaatgtagtggtacgattttggtttattgtaatttttatttttcgggtttaagttatttttttgttttagttttttgaggagttgggagtataggtatgtgttattatattaggttaatttttgtgtttttttgtagagatggagtttcgttatgttgtttaggttggttttaaattcgtgggtttaagtaatttgtttgttttagttttttgggattatagacgtgaattatcgtgtttggttgaggtggtttttatataaagtagagaaaattatttttagtttaaaataaattaataagtattgagtgtttatgtagaaaaagattagaaggaaacgtgaatatgttaatagtgtttgtttggaggacgtaattattattgattattttttttatattttttaatttaattattttgttataagtaggtgtgatttttaaaattataaaagataaacgttggttttttgtttgtgttttgttttttgagatagggttttattttgttatttaggagttggagtatagtggtgtggttatagtttattgtagttttaaatttttaatttaagtaatttttttatttgagttttttgaggagttgggattataggtaagcgttattatttttagtatttttgttgtttagattggtttcgaacgtttggttttaagcgatttttttatcgtagttttttaaagttgggattataggcgtgagttattacgtttagtaaagattgttttttaattaggaagatagatgttttttagtattttttgtttttttttttttttttttttttgatacggagtattgttttgttgtttaggttggagtgtagtagtatagtttcggtttattgtaatttttgtttttcgggtttaagagatttttttgttttagtttttagagtagttgggattataagcgtgtattattatatttggttaatttttgtatttttagtagagatggggtttcgttatgttgattagtttggttttgaatttttgattttaagggatttattcgttttggttttttaaagtgttgggattatatgcgtgagttattattttcggtttgttttttagtatttttaatttttgttttttggtattatttggttaagtagatgaaaagttttagtgagttgttagtcggtattaggttggggttttttttaggtagttttaagtggttaggatttggttttttttttagagttgggtttagaaattaagatcgggaatgcgtgatggttgttttgcgggtttttgttatgaggttatttttttggttttagtgatcggtcgttggttgtagggagtatgtgggtttagttagggtttgtgttaatatggttttgttttatttacggtttagtgggtttttttatttttcgttgtatgataattttaggaaaaatgttaggagggagggagtcgttgggggtgtgataggagagattttttagggatagatttgtaaaaattgttttaaagttttttttaaggatttttaaggtttttattgttttttattgataggttacggttcgggtagagaaagttggggatggagttggcggggggagggtggttagtattcgtaaggtaaggagatgagttgggagaataggggttgggagggtagttttaggttagtttttgtttttagaattattgttttttttttttggttataaagtgaggttggttagatataggtttattttataggttgggaggttgggcgtgaaagtattgtgtttgtatggggtattttatggtgaatattattagagttaatttttagggtttgttgttttatagggaagttagtgtaaggcgtttatggaatttagaagtatttaaaggatttgatagttatgagttgggaggatttagttttgtagtaggagaaagagaggtagagagataggtttcgtaatatttgttttattcgttgtgttgttttgagtatagtttatttttttgtggtttcgagttttagttttgaggtttttaagattttttgggttttcgtagtttaggatgtttatttgaaaattaggtttagttagtagggtttttttcgttagtttattattggttagtttttgtttagtattttttagtttattatttttatttgtgtaaattttatattagtattttaagtttttttttttttaggaaggagattgtttttagatgtgttttttgttttttttcgattaaagtttagaaaataggaattagttttgcgttttttttttttatcgaattgttggtttttttggatgttttttttgattttttgttaatatttttataatataattagtttttagtttttttttaaatgtaatcggcgagtacgttgtagtttaggcggacggtgatgtttttattttgtaatttgcgagagttagtatattttttagttaggtgggttgtaggagttagtcgtggcgagggtaggaggtttgcgtgttgacggtatcggtattattaaaattacggttagattaaggttacggttaacgagtttttttatttgtaattttttttttattaaggtggttttagttttagtttcggttttagttttggttttggttttaggagttgtagatatatttttaagtttttattttaggagtttggttttatatatatcggaggatacggagttggggtataaatagttaagaataggtatatttgtaattaggagtagggggcggagggttgttgagatgtttttatttttatcggttgttttttttgacggtttattatttattatatattgattgtataattagggttgtgatatgtttgttttttatattatattattaaatttttaaatttgtttttaatttatatacgatgaggtaaatttagagttaataatttgtttattagtttttgaatttatgggtggttttaatttttttttttttagtttttttgggtttatatgagtattgaggtataagggaattttattagttgggaagtgtgttttttttttgttgattttatagtttttttagtttgtgtttgaagttgttaatatttttttatttagtattgttttttgtagtttgagttgtcgttgtgtgatttagggttagtgttttaatttttttggattatatttgtaagatgaggatgtcgtcgtatagtttattttaaatggttattaagttgtttgtatagttaatatttgtcgagtttgtgatacgattagttttgttttaatttcgaatgtggtatttttatttagtttgggggtggaattgttagtttttttttttttggataaggaagttgaaaggttttagaaggtattaaggttagttgatttgttagtaggtatagtgtttatttgttatttatagtttttttttgatcgtttcgtttgtttttttagttgagattttgtgtgtatttgaatattttgttaatggttgaatttgtattagggttattgtgttagttgggtttgttaggttatcgttttcgagttttgtttaaggtagggttagtgtttatattttgtttttttgttagtgttttatttaaggttttggaaaggttttggagttagagattcggttaaattttggtaatgttttatatttgttgtgtgattatgggttagcgatttagtttttttgtgtttttcgggttgttgtgagggttataggagatgtatagagggttttgagtttggtggttggtatgttgtaaaggttagttacgtggtgtaaggatggtattgatgataataaatgaatcgaacgaaaattaggttaattgggtttggggaggggcgttggttaaatagattcgagtggattaggattttgtatatgatgagtaagcgggaatagttttaaatagtaagtcgggtaggtttaggatgatttagttttgggtgttgtttagggttttttttcggtttttttgtcggtttggtttttttttgttttagtttgattgtttttatgggttttaataagtttttgattaggattgaggtagaatagatagggtttaagattttgtaggtaggtatagagtgtggatggtaaaaggagatgttttaggttttttgtcgttttttttttttcgaaggttgataatgttaatttatagaagaagttgtttttttcggtttcggattttattttaatatagtgtatgaggtagttgtgtttaaggggtgtgattatttttgtagatggaatttatttattgtgtttagtttattgttagagttcggaggacgggggaagtgaggtggggtattttttatagtgaagggaaaatttagtttagttatttttttttgtgttgtttttggaatttattttgttatggttttattttaatttagttttttaaagttttagagagttttgtttttttttttgtattttatttcgtttatttgtgttgggttagttttttagaagtttcgttttttgttatttttagggtattaaggttggttggtgggtttagggatttttattttttgatttagttttagtggtttattttatatttatcggtatttataggtgtgttttttattttcggtttttgtataggcggttttatattttgggagtttagttttttttaaggatttacgttagagtatagggatttttgtttttgatttttttttagttttaattacgagtagtttatgttatagtaattttttagttgtttgtagttgtttgttaagttatgataatggtttttgttttttaatttaatgtttgtatatagataaatcgttatattttaagtagattagatattattttttttaggaagttttttttgattgttttagttggatagaggttttttttttttgtgtttttttaatgtttaataggtatttattgagtattcgtgatatgtaaggtatttataatataagttagtgttttttgtttttttagagggtatatgaataaataaacggtaagattttttaatatttatttatgttttatagaaagttatttataggtatgggagggttgttttaattgcgggtgatagggaggtttttttaagatggtagcgttttagtaagatttgaatgaggcggttaggaggtttagggagggattttttaggagggaataagtgaatattttttcgtgaggatgagtttttatgttttaggagtagttaggttaggggatcggtgtagtgaataggggttgaggggagtggttaggtgacgtagggttttataggtcgttttacgatgagttagcgttttaagtatagtagatatttagggaaggtttaggttggggagtgatttgaatagattttttatttaggagtttatcggggtttttgggtttacgttgttgcgttattgtatgttttcgggggttcgggggggtattttttatattattattataggtagtatttttgggggaggtgtgttgtgtaggggattcgttggttattttgtcgggtaaattataggggattgtgtaggataggcggttagtttaggagggataattatttaagtaggggttagagggtattcggattcgggaggagtgtttaattttttaggtttaggtaattagaggtggggggcggggtgttgttttttgatatgggaggtttgggggtttggttgtattttttggtgtggaggtgttgggaggtgtggaggtttttttttgaggttgggattttttggttattttgatttattgtttcgattttattttttagtttgagggtatggtttgaatttatagtcgtatatatttttttttgtatagggttttgcggggtcggtatagtagttttttttttatagattaggatgtttagttttaggagggttgggattgtttaagatcgtataattagggttagatatagttgggttaattttgtgatttttggttttacgtatagattttaagtatataggtaaaattttgttggttgggagggttggggggtagatgagcggggggtagtttttttttagttttttaatatgttaggtttttgggtgggagggggtataaagattttattttttttaagagatagagaaagaggtagtggagggtttttttttggttgaggttttaggttttgagtggtgaatgtaattttatttggaggttggaagttaggcggttttgggggtgtgcgaggttcgttagtttagttgtagttttttttatgtaagggaattttttttaggtagcgtttttatgattagagagggggttaggaagaggtgagggttgtatttagagtgatattcgggtgggttttattttggggatacggttatatttttttttcggatttttgaagtttttaggtgcgggttaagggtttttagttgtaggtaggagagggttttatagttatagatttggggagtttagtttgtaaagtttagaggttttcggaggtcgttggttcggttttttgtgtagttgggtttttttgggaggttttttttcggtatttttagtttttagttcgtacgattttttatagttgggtttatttttttaggttcgggttatatggtgtaggttagtggggttttgggggagggtagggcgttaggaatagtttcgggggtggggggattggagtagagtttattttggtcgtttgtttattttgtatgaaggacgttagatttttatatgtggttattcgatttcgtttaattatgcgtaagttttggttatttttattttattgatgggaattaaattggttaaggagaagtttagaatttgagtagagtaggggtttaagttttttaggagttttaggtattttttagttttttttttcgagtattgagtttatatatttagtgttcggatgtttatttatttgggggttcggcgatcgttagttagtatggtttataaagggtttttgtgtaataggttttatttgatttttttaaaaatttttcgaggtaggataatgttatttaatttattttatagataaagtaattgagttataaaatggtttgttaaaagatatagaggtagaaagattaatagtaaagagtttttttgtgattttgattagtaaggtttttagaaaaaagtaagggatttcgaggtttttataggaatagagttttggaggagaataagagtttagttttatgttatttttaaggggtattttgaaggttaaggtattgggtttaagtaggttggattgtgttttttgtattttttttattttttgaagtttttttttttttatttaggtgggtcgtggaggtgtttataatatataatggaatagttggtaggttattgggttttttattgagttaaggggttcgattagaggtttaaatagtggtatagaaattatgagtttcgttgtaaattagtttaggttttggagttaagtagttttgtgtttatagttagggttagtcgtttttagttgtgtggtttgaggttagttttttaatttttttgtgtttcggtgttttttttgtagtagtaataggaatcgttttttacggcgatagtgtagatatattttatgaagcgtataaagtttcgagtttagcgtttggagtacgttaggacgtagtaagtggttatttatgatttatgaaatattaataaggtgaggggtggaatgatagtttttttgcgttgtttttaaaatggaaataaatttgtttagcgtttaaagtagtagaaagtgagttaaggataggtttttagcgatatgttttggtagagtgttttttgttggttttaggtagggtttagggcgggcggttattttttagatgagtttatcgttggtatttgtttttagagtatatgtttggattttttagatttttttttttttttttttgatttttttttattttgtaatttttattttttgttatttttttatttattttttttttttatttttgtttaaaaataaataatggaggttaaatgtgttagttggttttttggaaaggtttttttgtagtaggaacgcgacgggggtagtggaggattgtttagcgtaagttacgtgattttcgcgcggagtcggggaaggggaggcgttgagatcgagggtgttaggatcgaggtattgagatggggttattggataatggttagggttagttttcgtttttattttaataggggtttttatatttaggggttatatttttaaagttttttggataagagagataaattttattatagggttagaaacgttgtttttaggtcgttatttgggtgggggtgagagatgtttcgtcggtttttaaatatttattttgtggataaaattattaaggggaatttaatgtttttatagtagtttggttaagatataggtattaggtcgggcgtagtggtttacgtttgtagttttagtattttgggaggttgaggcgggcggatcgtttgaggttaggagttcgagattagtttggttaatatggtgaaattttatttttattaaaaatataaaaattagttaggtgtggtggtgtgagtttgtagttttagttatttaggaggttgagataggagaattgtttgaattttggaggtggaggttgttatgagtggatattatattattgtattttagtttggatgatagagcgagtaagatagttttaagaaaaaaaaagatgtaggtattgttttagggtttataagtataatttgatttttgatgttggtatttaattttgatgtagattttagtaggaaaagggagacgaattagaaggttgtggggacgaggggtttatagtagtgtttattagatttgttttggtaggtataagtgttttttggaggttgttagataagtagagggtttattttagagattttggttttggagggttgggttagggtttaggaagttgtatttcggtagggaatttagagttattttgagttttattttggaagtaagagttagggggtagaatagaatcggaattaaaagtttttgtgggtttagttttatggggatgggttcggttttatggggatggatttttgtattattcgaggtgattattagttcggtttttcgggattagttttgagtgttttttggggaaagcgggatttgtagaggatggttttttaggattcgtttgattatttatttttagttcgtttttattttagtttttttgatttttattttttatttagaattttggagatttggttttggaggtttagagattagaaatgaggggagataaggggagaagtttttttttttattcgttggttacgttaatgggttgattttttaggaagttatattagttattgttattgttttggtcgtttcgtttggtttcgaggttgggtgagtaagtatttcgttttgtttgtttttttatttgagttttttgttgatgttacgagaggtttgattacgcgtttaggaggtataggatagagtttagagttgtttaagaatatataaggttgaggttcgggttttgtatttgggaagggttaggaagggttaaaggaaaattttagttgagtataatggtttatgtttggaattttagtattttggtaggttaaggtaggaggattatttaagtttaggagttggagtttagtttgggaaatatagtaagattttatttttataaaaaaaaattaaaattaaaaaattaattaggtatggtggtatatatttgtagttttagttatttggtaggttgagatgggaggattgttgagtttaggaggtcgagattatagtgagcgggatattgggttattgaattttagtttgggcgatagagagagatcgttttaaaaaaaatttttatattttatggagtttagtagaattttcggttagggtgtttcgattgtgaaatgagcgtggtagttgttaattttcgagggtgaagatttatttattagtaatttgtattttggtacggtgagaggaagtgtttggggaaagacgtcggtcgaggtagagagtttagtttaatttatcgtggaggagttattttagttttaaagagaaagattaataaattttaggtgaatggtttaaaagttatttttgtatacgtagagggtgtattttgggatatgtggatatttttttttaggataggaagtaaaattagtaggtagagacgtgagtttttttgtttttgtcggagttaatttggagtttttatttcggtttttagggaagtatagatttttatttttatcgtagttaaaagattttttgttgatttttttagtagtatttagtttagttttgtggggagaggcggtagggggaggagatagagaaagatgagtttttggtagttgtgattggggggagagaaatgcggttttaatttgtttttgtttattttatagacgggcggtgttttattttaaaatttagggtagttgagggattgaaggaagagggggatattttttaattggggtttttttttattttattttatggcgttttatataggaaagagttggaaggtttcgggtttttggtatttagttaaagttttaggtaggggtttagatattgggttgtgttattattttaggtagttcgggagttagcgacggtagagttttatttttatttcgattattgtatagtatttcgtttttaggatagtttagtagttaggttgttttagggtttaaatttagatatttaattgtgggggttttaggtaagtggttgaagttttttgcgttttgattttttaatttggaaaatgggatgatgaaagtaattgttgggtagggtaaggggtaagtgaaagttagcgtttgagagtgatgtggttaggatcgttgttgtgattatatattgagttttttttttttatttgagataagggttttattgattgttgttagaaagatttagatttagaaggattaggaaagtcgttttatttataattttagagggaaggggaggttttcgtgttagttggttgttgtaggggagagggtgggagatagatgggggatagaggagtaggggtagtaggaggaacggtcggtagggaagttcgtttgagatttaaaggattgtttattaggaggatagtttaggttttttttattgagaaagatttttttggatagttgggttgaggatttttaggttttttgggtggagtagaattagttattattgaagttatataggtttgtaagtataagtgggggattgtttaggtatttttgttttataggggttaggtattaaggttagggtggttagaggatatgacgtagtttagtaggggtttcgtagaattattagttaagaagatatatgtagaagtacgtaagtgtttcgaggaggtaaattttttgttggattgaatatggggagttgagtttttaattattgagtcgggttgttcggttcgtttttttttttttgaatagaaggtttttagatagagtagttaggtaatagtatggttaagtaggggtttgtattttagttttgttttgtagtttgattaggttgtcgtttttttaggagatacgggattggttagggtttttttaggttgttataggaataaggtagggttgtgattttttttatggtttaggtatttgggggagggattatgagttttagtttaggggatagataggaaacggatagttcgttttttttttaattacggagttggttttttttttatcgtattttttttagttatgttttttattagaagattatcgtatttaatgggtggttttgtagcgatatttagtttaatgaagttatttggtgggggttttgggggatgtagttttttgaaatatatacgggtagtgggtgagtcggaggttgcgtggggttttgttttttggggatggttaggaggtgttttaattatttgtaattcgagtttatagtgatcgggatttgttgtttttttattttagtttttttttattagtattcgttaagcgttagttagtaggtgtcggtacggtttaaggtaggtttgtagttagattagtatcgggggagggatcgggagagagatttttagagtggaagttatagttttttttttttttaggttgggtaatagattattatttttagttagttttggggaagggggaggggttagttgggtcgtaggtatagcgttggggttttttgaggtggttgttgttgattacggttttttttttttttgggttgggtaatagattattattttcggtttattttagggaagcgggaggggttagttggggtataggtatagcgtcggggtttttgcggcggttgttgttgattacgggtttgttattttttttttagttgggttgttatttcggttttgaaagcgttttttttagtttttaattcgtgtttaggaggtagtcgatattttaagcgttgttatagtaggaggttgggtttgtaagtgtgattcgtttggggaggggtagagggaaagattattttcgtttaaatagcggtttttttttttttttcgggggtttttatagggtttttagtttttttttggttaagaggtaaggagaggtaggaaagttttaggaatatcggtagagaagagatagggtaggttgttagaggaagtaggttgtagggtgtttaaggttttaggttgggttttgggaggttagggtatgggtaattaggaggtttaggtagggaaatttgtttcgtagggattttgggagataggggagaggggatatgatagtcgttttttgttgttttttggttgtggtttttaggggttttagtttagattagaagtattttatgtatcgggtttcggtttagtttggaagtacggtttatagatttatatgattatttgggtagtgatttttaaaaggtttttcgttattagttggggagttttcgaggggagggtggttttgtagagtatttggagatattaatgggtcgtgaggaaaggaggaggcgtggatatttttacggttttaagagaaaattaaggtagagttggaggttgggcgtggcggtttatatttgtaattttagtattttgggaagtcgaggtgggtagattatttgaggttaggagtttaagattagtttggttaatatggtgaaaatcggtttttgttaaaaatataaaaattagtttgttatggtgatacgcgtttgtagttttagttatttaggaggttgaggtaggagaattgtttgaatttaggaggtggagattgtagtgagttaagatggtattattgtattttagtttgggtaatagagtaaaattttattttaagaaaaaaaaagagtagagttggaggttaggcggtttttagagtttgataaggaggtcgtggggttgggttgttttttcggttatttgaggggtagggattggtttagtttgagttttagatttataagaggttgaatcggagcgggatttcgagatgaggtagggttattttgtttatatttgtgtttaggttttaatagttattttttttaggaatttagtttgatggttttttaggttgagaggttgttaaggggttgtaaggtgtcgtaacgtgtgagtcggtgggttttgatgtgtgatagttcggggtattttttttatcgttagggaataggaatgaggagttttttatttttagtgtttggtaggtaggaggtcgttattggattgtgtgtttaggtgttattagatttcgagggtttacggatacggtatatgatttttaatgattaacgtttgtgtagtaggtgttgaggtgttttaatttcgagtaaggttgggtttttggaatttttttttcggtaggaggatttgtagttgaggaatttttaagaaattttttggtagtaaataaagtatggggttggacggtggatttatgagtgtttttatatgaatgcggatatagatagaaaagacggtaaatatttgtgaataaaaggaatggtttttgcgtattgaatttttatttatcggtttttgtttggtataaagtttttaggaattttttaatagttttagttagaaacgtgtttttgtttggttatgtggaaaattttatatatattaagatatatgatgtttttggttttttttacgaatgttttatgttttttgggtttatgatttggaatttgtagatttttgttgtttttgttttagagttataaggattttggatgtaggaaatattttttatgtgtaagggttttttttttttttgttagggtttatcggtttttttttgtttataggtgttatttaaatttttgtatttgtggttttttttttttaattatttcgtgtaattcgttaatagtttttttatttttagagtttggttgttggagatatataaggtatatagaattcgtgaaatgatattgagtatttattaggtatttattgtgtgtttcgtttggtaataataagtaaaattataatgttttgggtatatgagtatatttttttatgtttatttttttagtaatttaatgagatggttttataaatggggaaattgaggatagggaggttagattggtttaaagttataggttaggaggggtagggttaaaatttaaatttagatagtttggtattaaattttagttttttatacgaaaggtattttgtaatttttcgagaaggttgggattattatttttattgtatagatgaggaaattaagatgttaaatggttagatagttttggagttaggaggtgggtttagtggtttatgggagtatatggaatggagtttatgggaggttcgaggttgggatttcgtattttattttggtttaagggatgaggtgattgggagtgttagagatattttgggattggttatttaggtgttttgtatttagttttagcgttgagtgggcgagggtggataatttgttatttagtagggttgttgttcgtatttcggtggttttttaaagtttggttaagtaaagtaagattgttttcggattagagtgatttttaagttatataagtatttagttatgtttcggaggatgtaggattgggaaggttttttttttatcgtatttttatttagtttttttatggggtagttggttttaggtatagattagacgtttttttttttgtttgttgtcggtatgtttttggttttattgttgttttagggaggggtttaagagtttttcggtttcgttatttattatatttcgtttagagggtcgggggtttagtattaacgttaagtatttagtagtaaaattacgggttggaaagagttatagtgttgttttgatttggttttattttatatcgggtgtcgtttttattagtttttttttgtttttggttttattttttaggtattataagttttgtaggtttaaagttaaatttattagtttttgattttttttagttgggattagggtgaggttttcgtttaggtgtaaaagttaaggtagtgttaaaaaatttaggaattaaataatattttgaagtaatattttaaataaattaaattttacgttgaataaattttgatagggttgtgtacgtgtagggttgggtttgttttaatttaaaattttaatatttgtttattatagagattattatgtattatttcgatattgaaaaatattgtattaaatattatttgtgttgatttttgagttttttggtgtttttttatattttgtttttgataagtgtttgatatattttgttttagtcggttttgttttttaggtgtttttttggggttgttttgtttacgtttttcgtagttattaggagttattgagttattgtatttgttttattttgttttttatgttttcgtatcgtttatttcgttatgtttttttcgtgtgttttggtcgtacgttagttttagataggagttcggtgggttgggagtttatattaatgttgttttttttcggtttcggtgtcgggtatagggtagtattggagatttttttttttttttttttttttttttttttgagatatagttttattttgttatttaggttggagtgtagtggcgtaattttggtttattgtaatttttattttttaggtttaagttttgttttttggaattaagtagatttttttgttttagtttatcgagtagttgggattataggtatacgttattatatttagttaatttttatatttttagtagagacggggttttgttatgttggttaggttggtttcgaatttttgattttaggtgatttgtttgttttaattttttaaagtgttgggattataggtgtgaggtattacgtttggtcgagattttttgaataaataaatattatcggtatggagattcgtttagggaatttgtttagattttgttattgtatttttgtttgttgcgtttagaggtaatttagggtcgttttagtcgtttttatttggttattttttggtttttatttaggtcggtttgttttattttgtgggttaagaaaacgatttagtgggtggtgattagtattttttttttaatttgaaaagaatatatttattagcggtggtagtaatttaatgttttttagttgatgaaggtaatatgtttgtttataatggaatggtttatgttatggtggaatattatttagggacgtattggtatttgttataatgtggatggattttggaaatatgatattaagtggagaagttagatataaaggttaaacgtgtaattttttgtataagaaatgtttagaatcggttaggcgtagtagtttacgtttgtaattttagaattttgggaggttaaggtaggaggattatttgagtttaggagtttaagattagtttgggtaatatggtgaaattttatttttataaaaaatataaaaattagtcgggtatggtggtataggtttgtagttttagttattcgggaggttatggtgggaggatggtttgagtttgggaggtggaggttgtagtgagtagagattgagttattgtattttagtttgggtgatagagtgagattttattttaaaaaaaaaaaaaaaaaaaaaaagaatttatatagataggaaggaaatatggaggaggagggtaggattgatagttaaaggttacggggtttttttttaagaaaaaaattttttaaattttttaaatttttaattttttaaaattggttgtggtgacgatggttgtattattttttgaatagattgaaaattatggaattatgtattttaaatgggtggattgggttacgcggtgatttatgtttgtaattttagtattttgggaggttgaggcgggtggattatttgaggttaggagttcgagattagttttaatatggagaaatttcgtttttattaaaaatataaaattagtcgggcgtagtggtatatgtttgtaattttagttattcgggaggttgaggtaggagaattggttgaatttaggaggcggaggttgtagttagtcgagatggcgttattgtattttagtttaggcgataagagtgaaatttcgttttaaaaaaataaataaataaataaattggtggattgtatagtagtttatttggattttaataaagttgtttaaaaaaaaatgaaaaaaagttttttttttttttaaaataaataaataaaaagaaaaaaagagagaggggaaaaaaaaaaaaaaaaagaaaatattgagtgtagtatacgtatggtaaaggtaagaattttattacggaaatttggttttattaatatattttatttttatttttattttatatataggtgtgttttggttcgtggtgttaatcgtatgtttttttggaggttgtagtttagattggttttgaaagttgttttttgggtaattttaaattttttataatttttgaagtttttggtttgttgggattatttagttttttagatttagtttcgttattatttatttaagattgtagttttggggaggggggtttttttttaagggtgtaggggttttgtggttttatttttttttagaatatatattattttgtattgtatatatgtgttttaatatggagtattttaggacgttggttatagttagttatgtttgtatatcgattgatcgatcgtgttttgttgattaattatgttaattatcgcgttgtatattgtttttattaagcgagttaaagtaattttttcggaataagttgacggattttaaataagttaaaagatatttttttaggaaaaaaatagtaatgaattttaagaagaaagaaaaatttttaaatttatagatttatggaaaaagtttaagtttttaaagtgttagatttttttaaaagtattaggtttagatggttttacgagtgaatttttgaaaagttttaatagagagattattatgttgttgtttaaaatgttttagaaggtagagggtaaaagaaatgtatttaaattgtttttgttaagttagtataatgtagatattaaaattgataaaaatagtatatatatatatatatatatatatatatatatacgttttattcgttttagattaagttcgttgttgtgtatttaagtaatattatttatttttatttcgttgttgaaattaaaatatattttaatggatttatgattttaatatgtaaaaatgaaattatagaagtattagaagaaaacgtgggtgaaatttttttttataattttagaacgtaggagatttttaaataggatgtgaattttaaaagttaaaagggaaagtagagatttgataatattaggattaaaatgttttgtgtagaagaatattttagaaataaaattaaaagtaggtagttggggataagatattcgtatttgttgtgataaagatgtataaataatttttttttttttttagataggattttattttgttatttaggttggagtgtagtggtatgattatagtttatagtagttttaaatttttagatttaaatgatttttttatattagtttttcgagtagtcgggattataggcgtattattttatttagttaatttttgtagagatgcggttttgttatgttgtttaggttggtttcgaatttttaagtttaagtaattcgtttattttagttttttaaagtgttgggattataggtgttagttattacgtttggtttataaagaattttttttaaaaaattttaataagaaaaggatatattttttaaatgaaaagagaatatagggttttggtttataatatacgaagagataatttttttcgtttgatcgagatgtataaaataaaatattaattggagagtatttggtttttagttaggggtaaggggtataggatttttttgttggattattattgtatagggtttagtagatagttgagtaggtcgacgaggggaggggttttaaaaaattttagtaattattttagaggttaatttaggaataaggattaattttttttttttttttttttttttgatagggagtttcgttttgttatttaggttggagtgtaatggtacgattttggtttattgtaatttttgtttgttgggtttaagtaagttttttgttttagttttttgagtaattgggattataggtataagttattatgtttagttaatttttgtatttttagtagagatggggttttattatgttggttaggttggttttgaatttttgattttaagtgattagttcgttttggttttttaaagtgttgggattataggtgtgagttattgtgtttagtagattaaaatttaaatgtatatatttttgatatagaaatttattaagagtttattttttagttatgtgtgtatatgtataagtgcgagaatatttgttgtagttttttaattatagtgggaagttggataagtttggtagggttatgggatagttgatgatataattattaaaaggaacgtgttattttgggaggtcgaggtgggcggattttaaggttaggagtttaagagtagtttggttaatatggtgaaatttcgtttttattaaaaatataaaaattagttaggtgtggtggtaagtatttgtgattttagttatttgggaggttgaggtaggagaatcgtttgaaagcggaaggcgaaaggtggaggttatagtgagttatagtgagttgagatcgtattattgtattttagtttgggttacgttttgttaaaaaaaaaaaaaaagaaaaagaaaaaggaacgtgttatatttataagtggtaatagtgttgttaaatggaaaaaataaaagttggtagtagaagtttgattttttttgtgtttttgaaaagtttatatttatatattgattttttttatataagttttgaatgattttgtaggaataaaatttaggagaatgttatatttagttgttaatatggttattttttgggagagagttggggaatgggagagaaaaatttttttttaaattttatgtgatttttattttttatttaagaatgattgggtatcgttttttttttttttttttagatgggagttttgttttgttgtttaggttggattgtattggtataattttagtttattgtaattttcgttttttgggtttaagtgatttttttgttttagttttttaagtagttgggattataggtgttcgttattacgtttcgtcgtgtattgttttttaggatgaagaaagggaaaggttatagggagaatgggagttagaatatagagtagggtttttaaatattagtttgcgggtgagagagatacggggcgatattatcggtttggaatttagggatggtatgaggtgttgtttaggggttttagataaggtttgtttgttgattaagtaagggttgtgttggtttttgtttatgtgtttgtttaatacgaattttttaggcgttttattttgttttacgaattattattgtttattttaattacgttgtataggaagaattgtgtttatttttataatgagaaaacggattagagaggaaagttattaggtagggtaggggcggtagtttaggtagtgtgagggtaaagtcggtgtttttttgttatttttttatatacgagtgggtaaggtattataggagtttatattttaatttttgcgggttattttggaaggcggtagatggaattagtgatttttagggttatttttagttttaggttttagataggggtcgtggagtggaatcgagtttgatttaggtgtgttgatggtagttatgtaattgtggataaattatttttttttttatttgtattggatgagatcgggaatttttattttgggttttttaagagttttggggttttatagagtatatttagtagtagtagtgggatggggggatagggttaggggagttttatgttttttttaattttaattagagtatttttattttaatttttttttgggtttagtgtttagagagaacgggaaggaagtttagttttggttatgggttattttagtttgttagttatagtttatattttaggagttttttttggattgaaggagatagagttatttataatatttatagaaaatttcggagaggaagtggagtttaattgaggaagcgtttttttgtagtttttagaaatgaggttataggtgagatagtgtgttagggtggattatatggtatttttttaggttgtttgttggaatttagggtttggttaggggttgtttatattttgggtttcgaggcggggagtttgagtgcgtttttttagggttgaatgtgttttttgtttatatcgtatagagtatggttgtttggtcgcggcgcgttttttcggataggttcgttattgtgtagatttttaatttcggtagttgtttcgggtttgggaggcggcgggtatagatatagttttttttttttttggtagttgttttgattttttgggataagtgttgagaggcggttttatttagtgttatgtgtttgggggtcggggttttattttggggttaggttgggtggttagggttatagagttgtagggggcggagtagagaaatcgtttttagcgtttgttttttggttttattttttttcgtagttgcgttttatttaaggtattttatagttgttcggtattcgttgtattttcggattagtttttttttttttttattattgtacggtgtttggtaggtcggcgaggggaggggttttttttttgggttttggagttaggttttgttttttggttttatttcgttttattacgaaggagatatatcgggtttggttaattttttcgtattgatttttgtttttttagtatatgcgggattttttattttagatttaggtttgagaggttttagggatagttcggagaaggagggtatttgtttttagaaggggaaagagaaagagatttaattttaaagtaaaaggggatttgggtgttttttgtaagtagtttaggaaaatgggaggaggtgggagtagcgggatttttcgagtaaggtatttcggtaggaacgttagtgttttttggatatttttagaagtagaagtatatagttttatagaaaaattttgtaggtttaggattcgaggtatgatacgatttaaatttattgttttattagatattagtgagtttttcgacgtttattaaggttttttgttttatatttggtattggacgaatttgtatattttgttttagggagtttatagtttagggataggtttagagtttatgtggggtgttttgtaaatacggggttagaagttgggttgtttatggggttttttttttttaaattatagtggttattttttttttaattttatagtttttgatttttattaggaatttttggggtttagtaggtgttttttttttgtaggttgatgttcgttttttttattttttatttaggtttagttttgattttattttttttaaagttatttttttattgttttgtgttgggtggttttagggagttttgtgttttgattaattttatatttaacgttgtattggtagttttgttgtttgtgttgagatttttttttgttttgtttttggaatatacggttcggtgcggattaagtatgcgaagagttacgtttattattattagttcgggggggtttgattttttgtttttttaacgttttatttatatgataaagatttttagattttttgggttataggaaaattattgagatatgttgttatgtttatttcgttttaattttatatttatgtttataagtggttttagaattattgtggattttttttttggtttttggggtgggtggatatatgagagtttagtttttagttatttttgtagatgtttttttgatagattaagaaattgaggttgggaggggtggaatgatagtttagaattagttgatttatggggtagagttgggatatgtttagaattgagttgggtattgggtttggttttttttttgtttttagtgagtattttaagaaggtagagaattagatttatgaacgagcgttgagtattcgttttataaggtagttttggagaaatttggttggtgtggttgaggagtcggaggggggtaattttggtggggggggttttgagttagtagttagtttttgtaggtttagtattgggtgttgtagtttagttttattttattttatttagaggtatttatgttggggggtaggaaaagagtagggatttaggagaggaggtaaggtcgtttttatttagagtttgagaggattagggatgattttaaaggatgagcgtttttttgtgggaggatagtaaggagggtgttaagtttaggggtagggttagagtttcggaaatcgagaatttattttattagtataaagtttagattttattaggttttggggcggaggagtaggtagggatgtttttgttttttgtagcgttttttttttttttttttttttttaattatttaggtgtttatatttttttttgaaatgttgattttttttagaatttttatattgaagttaatatttatttattgagttttttagtataatttttagaggagagattaggtgttttgggggtaaagttgattaggaaagtttttgtttggtttttagggacgatttatgggggttattatatttgtttataagaattataaaaaagttattttaatttattattagtggtttatttttttagtataattttatggtatatttattatgtttaagttatttatttggtattttatgggattttttttttttttttttttttttttgagatagggttttattttgttttttaggttggagtgtagtggtataattttagtttatcgtagttttaattttttatgtttaggtggtttttttattttaatttttttagtagttgggattataagcgtatgttattatgtttggttaattttttgtattttttgtaaagatagggtttttttatgttgtttaggttagttttaaatttttgggtttaagtaatttgtttgtttcggtttttaaagtgttggatttataggtatgagttattgtatttggttttttatgggattttttataaaaattaagataggttgggtacggtggtatgattttagtattttgggaggttagggaagttgaggtgggtgggttacgaggttaggagttcgagattagtttggtttatatggtgaaatttcgtttttattaaaaatataaaagttagttaggcgtggtagtttacgtttatagttttagttattcgggaggttgaggtagaagaatcgtttgaatttgggaggtagaggttgtagtaagttgagattatgttattgtattttagtttgggtgatagagagagattttattttaaaaaataaaaaataaaaaaaaaatataaaaaaaaataaagataatagttttatttttagaatttagtgggggtatgaaaggaattttgaagattatatagtaaaattttaagtatggatatcgttggtttataggtgaattttaggtttttttttatttttgtattttttgtattttaaagaaagggtattcgattattttttatgatttgaaaaattatttttatatttaaaaaaaaaagtttagtagaggaaagaaagtttatatataaattatttatattttaagttaaatacgaggtatttggattaggttttgagggatgtataggagtttattaaggtagtgatgtaaagagaagtagaggttagggtttaggaggttagggtaaaggggttgtgaggaaaggtgtgagagattaagggaagattaaagtaggagaagttgggaaggagagaggtgtgagttgagtaggagagtgaattaatcgtggaggggtttatggtgagtgagtagagaaggtttagtacgggaagagattttagtagtgttgtgttttggggaagttagtttgggagtaatttagttggggttttaggagattttgttttgtatttatagttttggggtggagataaattatagtatagatgttttttcgtaggtagaagttaaggggttgggcgtttgtttagagggtacggaattttttttatgatttttttttttatggtgttagttggatttttggtgttcgggggatagaggggtcgtagagattggttagagttgtgtatgtcggggtttagggaatttttagtttagttttatatggaggggtagaaggggatgggtttgaaggaaagatgggtaggaagttgagttggagagaattggattcgtgtttagaacggtcgtgatatagagagggaggacggagaagtaagtaggtggtgtttcggaggaagaattagtggggtttaggtttgggtttttcgagaagttatttttatcggattttaagagtatttttttattgggaaggttttgttttcgtttgtttttgtattttttttatttggatttgtttaggtttttaggattgttagtttagtttacggatttttttacgtgagttggatttttatttgtataggtttttgttcgtgggtggtcgggtttgggatgttgatggtttttttttatgtttcggttttaacgtgtatattttattttatggagaaagttatcgtttttttagagcgttaggtttttggtagttttgaacgttgttgtttttacgtggtttgttttttttttttttttttggtttgatgaaattgtatttttattgttggggaagttttttggatattttttgtgttttagttattttgtttacggttcggtgagttttagaaagtagagttcgtaggttgtgtttttgggtttggttttcggtatagtttttggtataatttaggggttaaattgtgtttgtttttggaggagaatgtttttgtatatttttatggatatttttttatttgttttttagagttaggattacgtttttgtgtatttagtattagttattatcgagatttagatggttcggtgataatcgtttttttagttatattttgtttgatttagttgagtgtgaatatattaatttaggatgggggtgtattcggtacgttaaataaaggttttgtattaatagaaggtaggggaggaaatagttttttgttattttgtaaattgtttatgtttttggtttgatattatgttattagtaattattgttattgagtttgggtggttggggtagggtggttttttagagttaagtttagagagatgggagagggaatacgggattcgtatattgagggtcggaaaggattttttaaggtttattagtttttggttatttagtgtgtttcgatgttttttttgtaggaaatgtagagttttaggttttagattcgttaagataaatgtgtattttatatgtttatgaaagtatgaggagtattggtttttttttaaatttatattttttttaggttttatatttttttagtttttaagtttattgattattggagaatttttatttaaaaagaaaaattaaaaaggggttgggtggtttatgtttataattttaatattttgggaggtcgaggtaggaggtttatttgaatttaggagtttgagattagtttgggtaatttagtgagaatttgtttttataaaaaaaatttaaaaattagttaggtatggtggcgcgtaatttgtggttttaggtatttgggaggttgaggttggggaattatttgagtttagggggtagaggttgtagtaagtagtgattatattattgtacgttagtttggaggatagagtaagattttgttttaaaaaagttaaagaaaagttaaagaagatggaaagagggatttagagagatgtggaagtaatttaagggtttatcgatggaggaatagttatataatataagtgtatcgtataatagaatattatttagtttttgaaaggaaggaaattttgttttatgttatagtacgacggatgaatttttaggacgttatgttgagtgaaatgagttagatataaaatgggtagttattgtatttttttatatatataaggtttttagagtggttaaataaatttataataaagatagaaaatagaatggtggttgttagtagttgggggaggggtatggggagtttggtttaacggggacggagtttagtttgggaggatgaaaagggtatcggagatggatagcggtggtagttgcgtaatatcgtgaatgtattgaatgtcgttgaaacgtatattgtaaagtggttaaaattgtatattgtatgttgtgtattttattacggttagaaataagaagtagtagttaaattaaaaatttagattgtgttgtttgtttaatttaaagaaggtttattgagtattattgagttttgattttgtgtttagaattagatttggtttttgaggggtttttaatttagttggtattttattatagttttatggagttacgatttttgttggggttagggggtacgtttttgagaagggatttaattatgttttatagtttggtatttttaaataggttttgtgttttataggattggtattaattttttgtttgtaagttttatgttagtacggttgtgggtttgagtttttttaggacgttgttggagttttatggttttttttttttcgttagaagggtatttttaaataaaatcgtgtgtagttattatatagttttttggtttaggtatttttttttagtgttttgagaattttgttttgtaggttaaggtgttttttatgtttttttttttttgttataattattttttttgggggaggaggattagattatgggttttaatgtaagttttaggaggtatacgtttttttttttttttttaagttttcggtttttgttgggtatatttaggtagtttgtaattttttaagtaggagttattagaatgtgatagtttttttaggggttttaattttattttgttttatatttttgtatgagtttgttttggtttttgcgtggttttttattttttaagttttttaggttttttagggatatatagtagatagaggttttagtaaggtttacggtgatttataaaggaggttttttgaaatttagaaaatttttttaaatttttatttaagtttcgtttggggtattttggtatgtttttattagatagagagagttattttttttgagtttgtagatttttatttttatgtatttcggtttttttgggtttttagggtagtattttttattttatatttagtttttttttttaagattttgtggtaaagttagtaattaggttttttattattatagtatttaagatttagcgttttgcgatttatttttttggtttcggggtgtagttttagttatagggggttggggtttgggttttagtttgttttgtagttgagatataggggtaggttttgaattttttaaggtttgggttgggttgggggcggtgggcgttttagtaggtttgggtatttggatttttatttttttgggggttgcgtcggtggtaggggtagtgggtatttcggggattttggaggtagggggttttatttttcggtgggttgatttttggggtttgacgatggtgattttcgtttttcgaggggtcggttttggcgttttgtggtttaatatttcggtttttttgagttcgaatcgggacgggtcgatggtttcggcgttttttatttgtttggacgagatgttaatggatagtttagtgcgtcgggatatcggttcggtcgttttggggttcgagagttttatttttcgtagggacgttttgggggagcgttggtttagggagtttatatggcgggtcgagggttttgagttttttacgtttaggttttggaatttttgggtggagttggttatagtggttcggagtaggggagtttggatttttcggggtggggtggagttgggtgtttcgattttttcgattttaaaagatttttttaaggttgaaaaataaagagaggggatgtaattggtgaatggatggttagggaatatttcggtatgttttttgttaaggagtagtagaggaaggtaggcgatgcggcggtgagggtcgggggttttttttcgttttttatgttttagtaagcggaagggatagttttattttaggagaattattatgagttttggggtagagatgtaggttggagtgggaagatgttgttcgtcgtgttttgttatggttacggcgtaaattatatagtttttttttttagttacgtttatataggaacgttttagttttagagaagatttttatttttttttttttttttttgagatggagttttgttttgttgttttggttggagtgtagcggtatttttcgggtttaagcgatttttttattttagtttttttagtagttgggattataggtacgggttattatgtttggttaatttttgtatttttagtagagatggggttttattatgttggttagtttggtttcggatttttgattttaagcgatttattcgtttcggttttttaaagtgttgggattataggcgtgcgttatcgtgttcggttttgattttttttttgtcgcggttgtttttatttttttttatttttagttaaggtatatattgggatattattagtaaatatatttttattattagttatagcgggggatatgtttttaataataagtgatcgtaattgtaattaattagaatcgtagtaggaataaaattttattaatgatattaagggcggatattggagtttttagtgtcggcgaggcgtcgggtttatcgagtttattatatttgtagtcgtttaattttgggatgtaaagaatattagtatttttagtatagatggggaaagtggggtacggggtagatatagagttagattgtatattaggttgatattagagtttaaggttttaattatttggttgttcggtttttttagtttagtttataggaattaatttttttagttattagttttttttgtatttttttatttattattataagttcgtgtagtgatgttaattattagttttcgttttgtagttattttgtttttttattagggtttgttttttcggaggtagtggggatggtatttgggaagttgttatttttatagtttttataatcgtattttaaatgagagttagtcgtttttggttattagggttagagtagggagggatttatatggtaggtatatttattagttttttttttaggttagatttatagcgtatttttgtggagatttatagtgtttttttagtcgttttttgttttattaggttatagagttcgggttttatgggattttattattgttttttttgtttataggaaaagggatgatagttggtttttagtttttaataatagcgttttaggattaattttagtgttttttttttattcgtttttttttttttaaatgtatttaggtattggggaggggaagaggaagtttaattttttaattttggtcgttttagttgttagttttttgggtaaggtatttttgtgggcgttttttttaagttataggtattttttttttttggtggatatagacgaaattttgggttattaagtttaatttttattagaagttgggtaaggagtcgtgtggattttagagaatttttagttgttataggttttgttttagtttcgttattgttttagaggatatgggttcggcgtggttagagttgtttattttttaagagagtagaaatttggatttttatatgatattttttgatttttaaatgttggtataaagtaaaataagttttttttaaaatattgagtagtttggttgatgtggtgaaattttatttttattaaaaataaaaaattagttgggtatggtgatattcgtttatagttttagttatttaggaggttgaggtaggagaatcgtttgaattcgggaggtagaggttgtagagttgagatcgtgttattgtatttagtttgattgatagagcgagattttgtttttataaattaaaattaaaaataaaataaaatatcgtagggttaaataaaattaaatttataggttgtattcgtttatgggtttagttatgatttttagttgattacgtggtcgtagggtagtaggatattgagttttagagttaggggtgtgttaggtgtgggttttcgatatggtgtttttttgtttttttgtattttgtatgtaaattgttggttgtgttttgattttgtagaagttttagggttttaaggaaaggttgaatgtttatttttattagttagaaagtttagggtttaatgtttagaattgaatgtaatgagatgggtttattaagtttattatatttatattcgtttaaatttgggttgtaaagaatattattatcgttttcgtatagatggggaaagtgaagtacggggtagatatagagttagattgtatatcgggttgatgttagaaagtgtagagtttaatgtttgggttttcgtgcggtttttagggtttttcgcggttttttgatttgttttttgttttttgagtattgtttaaattgtttttatatggtgtgtttttgttttatgggtgttgtagagtaggggtcggtttttaggtgtttttagtattttttcgtgcggttaagttggagaatagaaattagataggagaaggttttgttttaggtttaatttaagaaaataaatgattttttttgggagattcggtgaattttttttttgggagtttttttggagttatttttattatggttaatttatgatcgaagatattgtattaaagtagaggttgttttggtgtgagtttacgattgagtttacggtgcggatgtaatgatttattttagttaggtttacgtgtataagcggattattttagaatcggagttggttttttttttagggtattttttttttttttagttgtttgcgtggttggcgttttattattttggttatttgcgtaaaatgtatatgtgtgtcggtttttaattattttttttttttttttaatgtttggtgtttttttatggatgggtttttttttttttattagttggtttttgtgtttattgtttggttttatgatttttttgggtgtttcggtttagtattatttttatgtttattagtttttagtaagttttgagatagtaggggttgttttattcgtaggggttattttattattaggacggcgttgtttaaaggcgagtttgttttagataatagttaggagattttatagtttttagaattgtaagagaatataattgtgtgttagaagaatagtgagaataggaggcgttttatttcggaggtgtttattttttttaggagatgttttattttgggggtgtttattttttttaaggaaattatgtttcggttggaatgttaagaaggtgatatttaaatgaagaggtgtttattttggtttacgttatttttttaaacgagtatgttatcgtttttttttttttttgggaattttttttaaagttaagtttattttagtttttttttcggggagttggttttttatatagtttatattattttttttttatgttattttggttacgttatgattgttgagattggttacgaggggtgtgtttcggtttttcgggaatagagttgaatgttttttattttatgatattatgtttttattaggttttaggcgtttttagaaaatttattaagttaggcgtggtggtttacgtttgtaattttaatattttgggaagttaaggtggatagatcgtttgagtttaggagtttaagataaatttgggtaatatggtaaagtttcgattttattaaataatataaaaattggttaggggtggtggtatatgtttgtaattttagttattcgagaggttgaggtgagaggattatttgaggttaggagattaaggttgtagtgagttatgattatattattatattttagtttggatgatagagtgagattttgttttaaaaaaaaaaaataattaaaatttattaaatgttaggcgtggtggtttatgtttgtaattttagtattttgggaggttaaggtaggtttaaggtaggcggattatttgaggttaggagttcgaaattagtttggttaatatggtaaaattttgtttttattaaaaatataaaaaattagttaggtatgggggtgggcgtttgtaattttagttatttggaaggttgaggtagaagaattatttaaattcgggaggtagaggttgtagtgagtttagatcgtgttatagtattttagtttgggcgataaagtaagattttattttaaaaaaaaggttggattataggattataggataggtataagttttgagggagtttttaaggaggagggacgtattagatttttatttttattttagtttgtgaagatttattttcgtttgaggttttgtagagggttgattagtgatttttaaaaagatatgtttaatatttaattttaagaatttacgaatgtgattttatttggaaaaagggtttttgtagatgtgattagggatttcgggatgagattattttggatttgggatgggttttaaatttagtgttcggtgtttttataggagaaaggtagaaggggatttgggatataaagagatacggtggggagggttacgtgatgagagtagagattgtagatgttgttagagttaaggagcgtttgggttaacgtaagttggaggaggtaaggaagggtttttttttcgagttgtcggagggagtgtggttttgttaatattttgatgttaaatttgtggtttttagaattatgagcgaattaatttttgttgggttatttggtttttagtaatttgttttagtagttttaggatatttataacgagatttttgggaagatgaaatttttggttgtatagtggtttagggtgaggttagttggtgtggttatttattttttagtttagttttaattttattataattatattcgataaatggtttattgtgggttaacggatacgtggttattttagagttgttatattaggagtttagaggagcgagagttgtttttttttttttttttggagtcgtataaaaattttagatggttggagaagttatcggaggaattatattattttagatttttgttttattgttgggatatgtggtaatgaaataagattatttttgttagggatgttttatgggtaattgtttttttacggaggatattgtgagttgtatttagtcgggaaatattaggagatgtttgttattaggttggtagaatagggttttttagtatttttttttttattagagttttaagattgcgttttgggttttgtagttatatacggtcgtttttttttttttaatgtgtaggttttttgggaagttttttgttattatttttatagtggaatcggtataatttgtttaggggtagtaggtttttgttattttatacgtttttattttttttgtggagggagacgtagttaaggggtatttatatttatttatagaagcgagagtgttcgtgagtttgttattttgtagattttagaatttcgtacgtgattgtatagatttataggtttaattgggtagatttaaaggatttacgtagtagggaggagtatcggatagtttttttttttgtttgtaaggagttaatgtaattgaaggatatagaagaggtttttagttgagtattataattgtggatcgtgtatagtgttagaaagatgcggagttaggttatgttgggaggatttttatgttgttattggaaggtaaagtagtgttatttttttatttatagagtaggaggtttttatttttgttagttattttttttatttgtgaatttaagttttttaaagttagattttaatttcgtaagtttttaaaagtttttttgggttttttttttaatttttatcgattttaatttgttttaaaagtttgaagatcgtttatgtgttttggtttatttttgggaatttattttaaggaaataattagaagtatagaaagatttacgtacgaggatatttgtattagtattaaattgataaaatttggaaatagttcgggttttcgtagattttttaaatttatatgttaaaggtttgtattattattaaaattatatttttgaagatgagaaatgtcgagaatattaagtaaaaatagtaggatataagatgtatataaagattttaattttattttatatatatatgtgtagtttgtacgtatatatatatttatattcgggtagaaaataacgatttttggatggaatgaatggcggtgggtgttgtttattatatttttttgttttttgagatgtttatattatatggggattatttagtatgtttagggaataaaattatcgatattgtttttttttttttttttttttgagatagtttcgttttgtcgtttagattggagtgtagtggcgtaatttcggtttatcgtaagttttattttttaggtttacgttatttttttgttttagtttttcgagtagttgggattataggtgttcggttattacgtttggttaatttttttgtatttttagtagagatacgattttatcgtgttagttaggatggttttaatttgttgattttatgattcgtttgtttcggttttttaaagtgttgcgattataggcgtgagttattgtattcggttaatattgtttttaaaaaatatattttggtattggttgggtatggtggtttatatttataattttagtattttgggaatttgaggttagaggatcgtttgagttaggagttcgagattagtttgggtaaatggtaagattttatgttggaaaaataaaattaaaaaaaaaaaaatatatatatatatagattttgatgttaataagttggagggtgtgggtaattgtatgttggtttatttttatttttatttttggaaaaatattttatagtttaggatgggtatagggttttttttatttttaagtatttacggttttagttgttatataaaaagaggttatagtgggttattttttagatgtaaatttttttttttaggtttatggcggggtcgaaataggagtagtttggatttgggtttatttagagaggaatgtgtcgtataagggattattgttaaggtttttgttttgattataggttgtttggtaaatcgtttttagtttttgaaattagattaagtattttttggtgtatatattaggttttagtttggggagggaatattaagcgagttatagagttttgttttagtttgggataaatgttatgtaaagaaatggtagagtttaaggttagaataattttatgcgtagtttagttttcgtaggagggagtaacgtggtttttgtttagggtagggtggaattttaggtttaggttttaggaacgttagttttggttaaattgggttttttttgagtagtagtaaagtaggttttgtttttgaagaaatattggttatttaggagttagggttagggtttagggaagtcggatagatggtgttaaggagtagggaagtatttttttgtatgttattttgagtttgtaggaaaaagttacgggaaaattttatttggtagataattttttataatttttaggatttatagagtgagtttagtagtatgtacgttatgggtatttttttgtttttatttttttgtgatattggattttggtataggtttttgatttgtgtagggtggggtgggtagttaggtagggttttggcgttggtagagtggggtttagttgtaaaggtttttttattttttatttatttaggatttgggggacgaggtttaaaggtttggtgtgtttttaaggagtttaaggattgttttagggttggagataggacgtatgggtttgtatagggatcgtgttttttattttagggttgagagtaggagaattaaataggagagtgatataattatagtttattttgagttttagtgtttttagtgttatttgttgtaggaggtgatggggtaataaggtgtttttgaggttaggcgcggtggtttatgtttgtaattttaatattttgggaggttgaggtgggtggattatttgaggttaggagttcgagattagtttgattaaaatggagaaattttatttttattaaaaatataaaaatagttaggcgtggtggtgtatgtttgtaattttagttattcgggaggttgaggtagaatagtttgaatttaggaggcggaggttgtggtgagtcgagattgtgttattgtattttattttgggtaataagagcgtaattttattttaaataaaaataaataaataaataaaaaataagattttttgggtgtaggtatggtacgcggtaggggtgattgttgttggtgtaattattattttttgggtgtgtgtttgtgggggttgtgtatgttgaaatgtgtggttattttgttggtgattaaggttgttttggttttattgttattaattacgtttattgattttatatggtttattttcgtgtttttatttagagttttttttagtgtttaagttttcggaaggttggaaggagtgagtagtgtagtttttggttaagaattgaagtataaaaattttagtttttttatttaattttaggtgggataaggttgggggtacggtttgtagtttttttatgttgttcggtatgggggttgggtagttatttgtggttataatgagttggtgaggtattttttattggttggattttttgtttggtttatttttatatttaggtattttttggtgtttttttttattgaaatttttgttttaggatttgtttttggagggatataaattagttttttagaattggtttgggttgtttggtggaggagggaggtggtttttggggtaggtggagtaggtttcggatagggaggaggatatagttggggtgatggggaggggtgtgtttttaggaagtaaaatcgtttaaaaggaaaggtttaaaaataggcgtagtgaagttgagcggagtttgtaaagggaagttaggaaatagtagtgttagtggagggcggtttttaggttttttatagagagttatatttgtttagggatagggataacgtgaatagaaggtaaagtttatattaaggcggaggaggcgttttttttttagagagtcgtagttagatagtttaaatttgttaaaggtttgggagggaagaattagggtattattttatttttagtttaattttttttttagttttttttttttttgtttttttaaggttaggtttggttgggttatagtgttagtagttaagattcgtttttagtgtcggtttagttcgtaggaggttagtttggtggttaaaggttattgattgtttaggtttatttgtatacgtggtttaatgattgaggtttgggatttggggttattatttatagtatttttggataaggaggaaaagaattatttttattaatttttggatggaggtgtagggagcgttaatagtatttttgaaaattttaaatgtattaggggggttagtatttagggaagagttataggaggttattttgatggattttgatgattatttttgtttaagtgttaggaggaggtttttttttttttgtttttggtaattttgggtttaagaagttttaggtatttcggaggttttttttgtttattatagttttatttaagaggtttggtttattttgtaatgatgatgtgagaatgagtaggtttgtttagtgttagagtttgtggttggattttcggttgaggttaagagaaataaataagttttttttttttttttgtacgttataggaagagtagttcgttggttgtaaggggattttttattttgtttatggggtatagtagtttatagtattttttttagaaacggagtattggtaggtttgggtttttgtaagatggaatataaaggggtgggtagttgattttaatagttagtttttgggattttaaatttttttttattttttaattttgtgatgttaatttttttttggataaagttttttaataatttggtaagttagtattagttgaattagttttagtttgaattagtagttttttttagtttagttatagttttatttttttagaagggaaaagaagttttacggatttttttataaggaatttttagaatttgttatggtgttcgtaggggatattggtattaattttgggtttattaaatgtagtgggtttaatagtgttttttaaaacgatatgttttaagttttaatttttggaatttgcgaatatgattatatttggaaaacggatttttgtagatgtaattaaggtaagggttttaaggtgagattattttgaatttagtgggttttaaatttaatggtgagtatttttataaaagatagaaaaggagaaagatatatagatagggggagaaagttacgtggagataggggttagagattagagatgatggtgatgcgtttgtaggttaaggaacgttaggaatttttaggagtcgtcggaagttatgtttgtaagtttttaggttgtggtattttgttatagtaattttaggatatagattttaggaatagaatatagaaaagaaacgggaggaggtttagagtttgttgtggttattttagttattttattcgatttttttagtgtttcgttaattttgaagttttttttagttattgagttatcggttttgaaaaggagatatgggtgttttggagttggtttagtttggtaggaggtagtttcgttttattgtttttttattagttattagtttatataggttttttatagtgggtaagtgcgttgttgttttagttttcgtcggttttttttttgttcggttttattagtcgtagagttttttgttgttgttttttttggtttaagaggtttatatatttagtttttttgggataaatttagtttatatttgttgttttatcgtagttatttaagggttttttttattaacgtgttttttaagggatagtaagttatacggtcgttttatttggggttagaattgtgttttattagagtaaggttttggagtaattatatttagggttagggagttatttgtttaagaatagaaacgtgtggtcgggcgcggcggtttacgtttgtaattttagtattttgggaggtagaggcgggtagattacgaggttaggagatcgagattattttggttaatatagtgaaatttcgtttttattaaaaatataaaaaattagtcgggcgtggtggcgggcgtttgtagttttagttattcgggaggttgaggtaggagaatggcgtgaattcgggaggcggagtttgtagcgagtcgagatcgcgttattgtattttagtttgggcgatagagcgagatttcgttttaaaaaaaaaaaaaaaaagcgaaatgtgtagttttttttttttttatttttgaaatatgaaggggaggtgattgtaggttttttgggaaagatttttttattttttttttttttttttttttttaagacggagttttgttttgtcgtttaggttgcggtgtagtggtgttatttttgtttattgtaagtttcgtttttcgggtttatgttatttttttgttttcgtttttcgagtagttgggattacgggcgtttgtttgggatagttacgtagtagtttttgttttaagttatttttttttacgtagagtagaattaggattatagtaaaggttttagaggaggttatcgtttatagggttttgggttttttttttgaaaggtagtttagtttttaagagggtaatagcgattgattcgggacgaaggtttttttgtgtttgttttcgttatttatcgcgtgtttttggtttcggtagttatagggttattttaggcggattttaaagtggcgttaagttgttggatttttttttttttttattaaattagttatgggaatgggagtatttttggtatatttttagatgtgttgtattggtttagcgttttttttattttcgggttttaaattagttgttggttgttttattaggagtagattgaggggaaatgggcggaagtcgtaggggaagagatgtgaggtagataaagaggaagaattttttggttggggtggggtcgttagggtttgggtgggagggtcgtttatttttcgtttttggtggaaggtagtagaagggtgggacggatttgtgtgggagggtttaggtgtggtttgtttgggggtaggagagggattagatgattttttaggtttttttgggttaaagattttttgataaatggttgtcgttgaaggtaggagcgaggttttgggaggtgattgatttcgaaaaattataggttgtagttttgagggttttaaaggttaagtacggagttttttaaaatgaggttttttttagttttaatttatttacgttttttaggtggttttagatatttcgttagggtttttttggtagtttttcgttttcgattttggagatagagaaacgtgatgttggtttttggtttgtttatagttttttcgtttttattatagggtcgttagttatttttttagtttatcgcgtgttttttttttttttttattttcgattttttaataatagtagatttttttttaaatatttttttgtttagatttcgggttttacgtatgttgtttttagaaatgtattttagttttttgcgaggagttagtaaggttgttcggtgtttttttttatggatgggaagttttgtcggggattaggattcggatttggagattttgaggagcgtgttggttagtgtttgttttgaggttcgggatagagttgttaggtataggtagtatcggtgtgagggtttagtttttcggataagtttttttttgtttgtttttagatttgttattgtatatataggcggtgattatttttgatttgtttgggtagagaagttattttttttttttttttcgttttattgtttattaggggaaatgttataagtatttaaaaaatgtaaaaaaaaaaaaaaaaaaaaaaaagcgtttaatattaggggttatttggtttaggtggagtttttattaattacggggttttttgtgttgtggttttaaggcgggtagtcgatggtttttgttcgagttaatatgagttgtagtttaattataggggacggtgattttagggagtagagtttaggtttcggttatagttgtatttaggagttagttgttttttagatttgtagagttaggggagaggtttggaggatcggtattgaatgatatgatttaaagcgcgttaagttgggttggaggtgacggtagagttatagtggttatagagtttttacgtgaatttatacggatttgtttggtttaggttttgttgaattttagggtgaggaggatttggtttttatttttaaagatatgaagaggttgataaagaagagttataggtaaaagggggtggtgggtgtgttgtgtaggaggggtcgtaattggacgtagaagattttagaaggggtaattagagagaggtagtatttttagaagacgggttgtttggttgttttaaatagtttagggtgtgattgaggggattttcggatttagtcggggttttttttgttttgagataacgtattgggaaattttattaagtttatttaagaatttgaaaagttttttggaaatttagcgggtagggcgggtttttgggaggatttttggtatatcgcgagagttagatatagcgagggggttttatatttttgtttagaagttttacggtagaggggtagaagtttagggaggagtaggcgttgagattagaggggtttataagagaggggtttggggtagggggtagttgttgagaagtttaggaaacggcgtttgtttttggggaagtgaagttttgggaatagggttggtgaaggggggcgggaagggggaggtgggggtggagggttaggttagattaggtattttttttagtagtagatttatgagtttttggaatttgtttatagaagtgataagtgttttgtttttagtttcgtttatatatttatttattaagtgtggtagggatagtcgttttttattatttattttgggatttggatttaagtggaggtttttggaggggtagatttaggggaaagggtttttttagaagtagtcgttatttagaggatttgagatgagaattttattacgtttttattagatagaggagattcgcggtgttttcgagtttggttttttattttttatttagtagcgtttttttcgtttattttaagtttagaatattttgttttttttaagattagttgtcgtagtggattgaatagtgatttttaaaagatatgttagagttttagttttcggatttgtgaatgtgataggagttggaatagggtttttgtagatgtaataaaggattttaagaggagagtattttggatttagggtgggttttaaatgtaatgataagtatttttacgagatatagagatatagagaaaaggttatgtgaagacggagtagggagtggcgtgacgtatttatatgtttaggagtattcgggagttattagaagttgggagagaggtttgggtcggagtttttcgtagaggttttaaaggattagtttggtcgatattttgattttggatttttggtttttagaattatttttagtttttaaagttcgtggggttttgttgtagtagttttagtaaattgttacgggggttttttttttttgttaagtttggtatttaaagttttttagttatttggggttaattatattgattttgggatttttaggttattcgtgtgttttatttttttgtttaatttttagtgtttgtgtggttatagtttttttttcgtgatatgagttttttgggtttttgagtgtttatttgttttgtattgaaggttgaagttaaattttggagagaattgattttttttgtgggtagggtaggtattgtgtttttagtatagttagagggtattggttgaaatgtgtttttgtaaagtgttttttttatgttcgtattttttttttaagtggggaagttagagaggttttttcgattttttttttagttttttggggtaggaagtttgtggttatttgttcgtaaggattaggtggatagataattagttttttttaggttatattttattaatagagggttttttaattttgttggtggtttatgagagaaggaaaaattgaaggagttgtttatagtaaattttaaatttttgtgttagagaggtttatggttgagtaaggtatttttatttttattgttttgagttgttaatttagtttagtttagtattgtgatttttgatttgtttgtgggttacgggagtttggtttgttaattagtattttttagatatttattttgtgaagtttttagtggttgagtgttttttcgtttttttcggatagcgtgggttataggggatattgggtaggaagatagttaagtttttattgtttagaaattgtttgggtttattgtagtaatagggatttatttattagtatgaggtttttttgtaggaggggtgggggtaggagggagtttgtggggtatagggttgtaggaggagttatttttttttttattaaatcgtaggttttagttaagttatttttagtatggttgtttgcgtgggaagtttatagttgagggattgtttgtacgtggtatgtaggagttataagcgttatttatattttatttcgggttaggtagatgatttttttggttttagttttttgatgaggaataggaagggttggatcgaaagattttttttagttcggatatggaatgattttacgagggttacggtgaggtttgttttagtttcgtatattagttcgggttagtagtttttaaaggtatagtcgtaggggttttggagtagggataaggaggattagtttattttatttttttgggtagaggttaaggattttgtttttggtttatattttttgtggttaaaaatgtagaagtaagtagtgttggtagaggtatttagatttttgggtaaagtaggggttttatttgatattttaggtttggagtacgagaaaattagtttaggttttaggttttttgattgttagcgattagggaatgtgatatttttcggtttttgtttttttattttttaattttagggggagattaggttgggtgatgtgtttttttttttgatagtaaatttttatttatttttatttttatttttgttttaagagggggttttttatggtcgggcgtagtggtttacgtttgtaattttggaattttgggaggtcgagatggatggattatttgaggataggagtttgagattagtttggttaatatggtgaaattttgtttttattaaaaaatatgtgagttggtaattttaagtttttagtagttttcgaatggaggttttttttttgtaggatttttaaattttataaatatgagtgtttgtaatttagttatttaggaggttgaggtatgagaattatttgaatttgggaggtagaggttgtagtgaattaagaacgtgttatcgttattttagtttgggatatagtgaaattttgttaaaaaaaaaaaaaaaaaaaggtgggggtttttttatgttgtttaggttggttttaaatttttgggtttaaggaatttttttgttttagttttttagagtgttgggattacgggtacgagtttatgaattttaaaaaataatatttattgttttgtttttgattgtaaaaggaatttaggtataaagtcgaaaatttgtaaaatgtataaaaataaagggaaaaaatttataaatttataatttaggtaatttttattaatattttgataaatgtttttttattttttattggggagtgtgtgtgtgtgtgtgtgtgtgtgtgtgtgtgtgtgtgtgtgtgtttaaataggtttatatagtgatgatgttgggtgtttttttttatgtggcgttatgtggttgaggtttttatatattttgggttcgttttttcgatttttttgtagttttgatgttttgattttagatatgttatttttggttcggattgtttaggagaattatttttggattttgttaaaaaatggattgttggtttttaatttttggtggttttggtttaggagggttgggtaagtttgggtatttcggagtgtttttggggcgttgtaggtgtgaatttttgtttttttgaagatttataagttttattttttttattttttttttttttttcgagaattttataagaggaaagtttttattcggaggttgttagggattcggagttgttagtttatagttttattttgtttttattttttcgggagttatttaaggataatgtttagttttagttgttaagttttagttttagggttagttatatattgaaggatatgtagaagtcgtcgtgtgttgggtattgttgaggataaaggtttgaatgataagcgggaataaagttataaggttttaaaatttgttcgaggttttatagttagggtttcggaaatttatgaaaaaagttagtttaatattttgttacggaatataggtaggagagggagtagtttttagttagtttttagttagtttttcgttagtttttttgcgaattattttatttcgggttatagttagggtagtcgtcgtttttttttttgttcgatagtttttgagggtaggagttagtttgtttattattgttttttttttattagggtttggtattttgtttggtatgtagtagaagtttaagaagggtttattgtgtttattttgtaatagttaatgtgtatgagtgtttattatatttgaagatagtgatttatttttgtttttattgtatagatgggaaattgaggtattgagaggttgatgatttttttatattgtcgtgtgggtaagggtaaggttagatgtgagtcggtacgttgggttatcgcgttttttgtttatatttcgttttgggtttgggaaggttattttcggagatttttacgatgttgatatttcgtttagttttttcgtgtatttttttttacgttttttagttatttaaagtattagttaggtagtattgttattttggttttgtaaatttagttattgagtggaagagtagttaggttgaagtggggtagaggtagttttcgttagattttagggtcgggatttttagttatttttattttttaaggattagtagatagagatttttatcgtgtttagttaggggttagggaataggtttttatagtgggggagtgatggatggatgtaggtgcggattgggaggattcgggtcggttttttagcgttggagttttagtagtttaatttattttgttgggttttcgtggggattaaaagatattttgtatataaagtattagtttagggtttggtatttaggaggtgtttaattaaaggaaatggttatgaaaaataataaggagaagtttagttataggaggtgtttgtgggtaaggagagaatagttggaagggtttggatttgggttagagataaagaatgtaagagggagggagggagagaaggagggagggagagaaagagggagggaaagaaagagggagggagagagggagggtagggtaggtaatagttggttttagggtagttgtgtgtaggagtttgttttattatttaaatattaggagagatgtaaatatttgagtgaggtttttttagtttggttttgttgtggttatagttagggttggagaaagagttttttttttattagggttttcgttttgtgttttttattttagttgttttaagattttatgttttcgggttaggagtaggggtttgagagtagtaattaggtagggtagcggggttagggagggatttcgtttttgtttttatttttttttttcgtttttgtttttatttttttttttttgtatagtattgggtttgtaaaggtgcgaatgaaggatttttttttttattcgattttaaggggtttaggcggttaagggttttttttgtagtttagaaaaaaaagtaaagtagttttttttgaggttttttggtggaggtttagggtttaaagttcgttgttataaatttgtagttttttttgtttttttaatagtgttttttttttatttgggttattttattattttggttttttttagttttttaggttttttggggaggaggatagatgtagagtttggatttcgtgcgtagtagggtttttttaatgttgcggtgtatttcgtttggttgcgggagtttgttttatgttatgatttgtgttggtattaatagtttttttttttattttttatttgagtgtcgagggtagttgtgttaggtatagatatatagttttttatatatattatgagtttgtagaaatggtaagagaaggtcgagcgtagtggtttatatttgtaattttagtattttgggaagttaaggtgggcggattatttgaggtaaggagtttgagattagtttggttaataggatgaaattttgtttttattaaaaatataaaaaattagttgggcgtggtggtgcgtgtttggagttttagttatttaggaggttgaggtaggagaatcgtttgaatttaggaggcggaggatgtagtgagtcgagattacgttattgtattgtagtttgggtaataagagcgaaattttgttttaaaaaaaaagaaagaaagaaaaagaaaaaaagaaaaggaaaatggtaagagaagttggttagtattatttgtttggtaaatttttatttcggtttttggttaggaagtttttttttaggaagttttttcgttttatttttttttttgagtttatgtttagatttttagtgtttagaatagagttggtttttggggtatttatggatggttgttggataaataaataagttaattgttttttttatttttagcgatgtttttggtttggtagggtatttagtagtaatgtttttcgagtggattttaaggagtattttttatcgtgtagtttgtattagggattttagttttttattttaaattaaaggaaaaaatttaattttagtaaatatatagagtattttattttttgatttttaatggggggtaagaggtagaggatagaggagaagattatttttttaggtttggtttggagttaaaaagatttgtatgtttttattgtagataatatcggtttttgggggatatagggtaggggtttggtttgtttttcgtagggaaattgtttatttacgtggaaagcggggttaagggtttttgtttggaattagttttttgtatatggggtggggggtggggatagaaggagattttgtttggattgtatggaaatttattagattgttggttgttgatttggtaggagtagagttatttttattttttagggttttgtttgggggaggggagaggttaggtggttttgtttaggttatattttttatggttaggaatgttttttttttattagaaagaaagatgagataggtttattttgaattttttggatataggaagggggtttatttgtggtttaggtggtttttttttttatatttaaggggttttataaggaggtgttaggatttttaggttttgttttagggaattgttgtttgtaaaggttataggtagagatagttaggaatgttttttatgttattggttatgggttggaggttgcgaaattaggtatagaattagaaagatttgttataggttgtaaagggttttagagagttttagttttttagaggggtagtattgtagaaggggtgagaaggaaaaattagtttttaggaattgtttatttagagtttatataatatttaggtggtacgagataacggtttattttttattttattttttcgttgttttttaagatttgagtttttgggggtgtttttagtagatagggggatgtggggtaattgtttttttttaattgtatatttggaggtaatttatatttagatgattttttcgaggttgtgattagagtttggggtaggggaggggaagcgggtggatgggaaggcgagggagatttttttaggaaagtcgttttaggtgtttgtaaggttttatcgtttatatttaaggtataggtttttggttttgaggatataggaaattcgatgttatgtggggaggagggtattgtaatgtatttaaggttaggttttttgattttttggatattggataaatgatggtttttttagttggtttagagatgttaggagtgatagaatgttaaaggttgtagggggatatttagaaattttcgagaaagaagatggataaggaaaaataaaaaaatacgagaagtttagtagagtttgagtttcgtattttcggttttttttatggttacgggtaattttttggagatttagttacgggagtagtggaggtaggtatgggtgggggggggggcgggttttattgtttatggtttcggttgatatcgaggttatttttttgtttttttaagtttttgggtattggtaggatttttaaaaacgataataaatttgaagtttttagaattgtttgttggtttagtttaaacggagtttcggggttttgtagattaaattaaatagtttgagtttagaaatgttttaggcgtttgggggtgtttaggggttaattggtgggtttgtttggttggagagatgataaatttttttatttttgggattgtgttttagagagtttcggattttttggttttataagtaatttagagtttttaaatttgggaaaaattaagagggttttggaaagaaaggtagtgtttgattatttttttttagtggttttgttaagggagagtataggaatttggtttttggttgggtttttgggatgaattaaaataaaaagaaaaagtcgggggagggggtggcggaatcgttcggggttttagtttaggttatatattaaggagattttagaggagtaggttagttttattttcggtacgatgatggacgggtatttggttggttggtaaagggaagagatggtaatagtgaggttttgaatttagtggttaagatttatttttgagtgtgattttttttgatgtttgggtatgtaagaaatgggaggtggagaaaggaggaggagattttagttttgttttttcggtattaggttattagggaatagtattttttttttaacgggtaggtagaggttataggttgttaggttgagaagtttttggtttttatagataaatgtatagtttgtatatttgtattattttgggtgatgtttattacgtacggttattatgtacgttttttattattaagatagtcgacgagattaggtggttattgtgtatcgggtatcgtggtgattgtttgatattgatttttgggggtttaggttttcggtgggtttgtttttttaggtatttagttttttttttattttttgatatttcgggtttagtgtaggggtatgggggtgtttagtggatgggtttacgggttgggtaagtagtacgtagttttggtttattagtttttggttttattattagataagatgagattgttttagttgttagtttagttttgtattatatttgattgggtttttgtagaggtttgttggatgagaatgtttagggtagtaggtattattttttgggatgtatattttgttataatcgttttttagggaaaggttagtttgtagagtcgaacgtaggttgttagcgttttcgttgtttttatggttcggttatttagtaagtgtttattttattgttagcgtttggttttgtagatgggtatatggtttatttatttgtgatattttagggtgggggtgggggtagatggtggtagggaagattaggataattttttagtaagaggaatttgtagttaatatgacgttagtttttagaatgttagttaggtaggaaaaggggggttttatggttgtattgggagtttgagtatttgtcgggtttagagggatttttaggcgggcgttattggtattagtgtttgtcgtgttttttataattagtggtgattatgttgttcggttttatttatatagtggtattatataggtttttgtttgagattttttatttttagatttgtatatttaagtatttaaatttatttgttttttgtaaatgtttttttttttcgtttagatgttatattagtcgcgatatttattatattcgtaggaggtaggattcgtgtttagcgttatgggttgtattttagagttttttagtaatttttaaagagagttgtttttaattttattttgtaggtagggaaataggcgaagaaattgaagaaatcgaagtcgtttagttttttaatggtagagtgagggcggtttgggtatttttatattgttatattttttatttttttaaagtattgtttttttggatgtaaattttgtttattagttttatttaaaatttttttggatagttatagtttatagaaagtatttttagtttgtagttatttagttattgtaggggtgttttggcgtttatttttatttgttttttttcggatatttagtttagagaatttatagtttcgttgtaaggttgattatagtgtatttgttgtttgggtgttgtgttcgtttttttttaaatgaattaattcgtagtcgggatagtgggtttgtttggttttgggttttgaatttaaagagtattaagttagtgttgttagtggttgtgggattcgtgtaagaggtttgtttttattttttatggtttttgttttttattataaaagtttaaattgtagagaggtagtatttataggatgttttgagttttggttgaaaggtagggtttattacgtaagaggtttattggtattaattagggataggtttgtatttattattaagtaacggggtttttttttttagagaggaaagaggtatttgaattttgttagcgcgttagtttttacgtttcggaggtgttgggatttttagataagaaggtatatttatatggttttttttatttagaagttcgttttatagtttgttttgtttttagaatatagatttgggggtttttttcgggcgatagtgggggttcgggagaagtttagatgttatatagttttgggatttgagtacgtgggttttgggttagattgttttaataaatattaaggatttttggattttttttcggtgtgtaaatttggttatagtaaatatcgttgagtaaagtaggttaatagttggtatttggaaaggtttttgttatataaagattcgagttgtaatcgtgtttgcgataatagatttggtttgaatttacgaaagtatatgtcgttcgttagtttcgtgtttttattaattagaagggagaaagaggaaagggttattttttttgttattttattacgggtagtggcgggtgttgtagtcgtttggaggttcgtttgtatagtggaaaagtagaaaatgagattttaaaaattttattagttaaatataaaatattttttttgttgttacgtggcggtttttatagagttttaaaattttgaagttcggagatttattttgaagggggagtaaaggcgggatgcgggaagtttgagtttatggaagatattgatattttttttatttttgggaattttgagtttgaaggattcggtttgaatagcggaaggattgaatttttgtgtaatttatcggtgatggaatataaagttatggtgttttcggtttttaagacgggagggatggggaaggttttgggtgaaggggataggcggggaaggaaaaggtgaagagaaaggtgttttttagggagggggtagatgtgtttaggatatgggatattggtagaattttaatttcgagtatatatataggtttacggacggtttttcgtttatttgttttttacgggtgtgttgtgtcggtttgggtatttgtttttttttttatgttaggttatttgtcgtttattttgtatattgttattagttttaagttttttagaatattttgattagggttttgtggtttttgttataggattttaggtttagacgtttgttcgattggaaaattgtttttagagatgtcgtggtttagagttcgttttgttttggggtggtttttggagttttcgttttttagtaatttatatggtgataggtatttatattcgttggttttaggaattttggggttattattttagcgttgtaaggagttggtagttttttttttattttttcggtttattttgtaggaattaagatattaggtgagtcgtttcgggaaagagatttgtgtttttacggcgttgtttttgcgtttatttttagttattttagatgtttttcgtggattagttgtattttcggcgggtatgtttggtttttcgtagtttggtttatatgatttttataggtaggtttttttttatgttttagttttttttttagttagtttattttagttttttttattgttgttggttgttgttggttagaaggttttttttttttttgtaatttaatttttatttttttttaaggttcgttttttttatattgattttttttttgttagttagtggtgatttttttttattttgattcggaagttgtttgtttatattatttttggttgggttgaattatatttttttttttattttttttaattattttttttttacgtttgtttgtttatttaaggttgtttaatttttatatatatatttttatattttttaattatattttaggttttttgggtattagggagggttatttttttatattttaggttagtttttatgtatatgcgtatttatgtatatatatatttttttacgtttatcgattcgggttatttgatggttttaagattagaatttttagtaaaattatttaggatatataagggggagattgataaatatagggaattagtagattgaggttttatttttcgagattgagaaatttttttttagagttaaaggattgttaattgttgtattaggatggttttaatgagtttattgttttggattaaattatagggttataaaattggtttgggagatagtcgtagaagtagttttagatggaggtatatgggggtaagggtggagttatatttagagatttaaggaaggggtattaataatttttatagtgtaaatggtgatagttgtataacgaatataattttaaattttggttttttttttcgttatagggttttcgttgagatacgagagtttttttttagaaattttattgggggttcgatattttttgttaggaattgagagtagagatttcgatttcgtaggtaggaggagagttttgtataatatagggtttttttttataagggtttattggaaagtggttagatcggttaagtcgtgttatttggatatttgggataaggaaggtttttggaggagcggtcgtagggaggagttgtaaagaggtaggggtagggaggttatatttattcggggattgtaggaggtttaacggaatatagtggatttagggagattttagtatgagtatgtgtttaaagatgtttagatgaggaggtgttgtgggggaggggggcgggaatagtaagtttttttagttttgtagatttagattttttttttttttgggaagtagggatgtaaagggatagagtttgaaaaagggtttttattattaagttgataaagtaattacgatgtttttagtttatattttgtatagcgttagtggttattggattataattttttttcgttttttcgtcgttttatattttttttaggtttagttttgaagaatagttattggtattttgtttggcgtttagttaaagttttggttttttaggaggtttcgttttttttatttagatagggttgattttaggtgggtcgtgtgggtagttgggtttaggatatttagatgttagttttggttttggttatggagcggggaggattttaggttggttattttttagtttggtttgatatttggatagtttgtttattttaatatagtttttttttttttcggtttattagagggttttgtttaagttagtttaggagttttttcgaggggcgggggttttaggtttcggtagaggtaggttcgttttttagaagttttgttttagagcgttggagattattgtgtgagtttttttttcgtttgttgtatttattttcgcggacgtaggacgtagagttttagtatcggtagttaagaggacgtaggaaagcgtacgtatttataggtttagagacgcggacgttagatttaggtttggatagagtagtttcgtaagttttaatatattttgtaaatttcgaagataggagagagttaaaatattttttttgttcgtacgtaggttttttttgttttttacggttcgattttgggaggcggatgaggatatttttaggtttggatgggggttatgggatattttattttagattttgttacgatttgggttgtgttcgttcggtgttttcggtttacgggttgtataatttggcggtttcgaaattggcgtgggggaggggagggttgtttattcgagtaggacgcggttgtttatttagtcggaggtgaggaacgatttttttatttcgttgtcgggtttaagcggggttcgagagtcgtcggggagagttaaagggaggggatcgatggattttttagagtgaaattgtgcgttttggagagtttcgaggtagtttcgcgagttttcgaggaggtcgttgtcgtttggtaaatataaataataataaaaggaaggaaatttaggcggtagtgcgtagaacgagtatagggttttgtgagggcgcgtagggtttacgcgggtgtttttaatagggttttttacgtaggcggcgcgggtacggggtcgggggcgcgcggcgtttttagcgggagggcgtttggattaggggtttcgtttttttttagcgtattttcgtttttttttagcgtattttcgtttcgcgttaggtttattcgtagggttttttttagtacgttcgcggtcgtagtagttagtttagtatttattttcgaagttcgaaatgattttatttagttgcgcgttgatcgcggggttcgatatgatggttggtgggtagcgggtcgcgcggagggtagcggcgaggaagcgttttcggcggggttcgggttttgcgcgttggttggggcgtcgcgttcgcgtttttgtagtgtagagttagtcgtcggaggagtttttaggttttttggtttagttgaatgaatgggggaggaaggcgggcgtcggttttttttcgcgcgttgcgttttcgtttcgttttcgtttttcgggcggattaggttttcgtattcgtatcggtttttttgtttcgtattggttgtttcgttcgtttgttaaggttaggtttggggggttggggttcgagtggtcgttgggggatagttttgggtatacgatcggagcgtttttttttttttcgtttggttcgcgtttaggggacggcgagagacgcggttttagttttttttttcgggcgtttcgttgcggttagatgtgggcggatgtggaggtcgggttatggcgaggagggcgggcgtttagaggggaagagattttttttttttttcgggcgtagggtttttttgtaggaggttgtatttgggtagttaaataaagttttttgttatcgtcgtcgcgcgttttgcgtttgtaagggttaaacggtagcgtacgcggttggtaggtaggatttcggtttgtgggtttaagagtcgaggggcgtagggcgaatatgcgagttttatggtattagcgagaggttattaatttttatttatcgagggtatttttgtagttaatatttttattacgattatcgtttcgggggttatcgttgtatttttttgggtgagttttggagaaggtattgttcgggagaaggggtatagggcggggatggaatacggttgttagagaagttagggacgggcgacgtttttttttttttataataagggttttttgagagtaggaagtagattttgttaggagtagacgttttcgaaggaaggtgtgaaggaaggagttaggtagtgagtgagtagaaagggagttgttttaagggttttttttttttttttgggttttaatttgaggtttagttttttttttaggttagcggtttttatttttaaattatattatttataaggtaggtagggtcgaggggttggggtagatttggggatttgggttagatatagaatttgagaagtaataggtttttatttttaagaagggttttttaggtttgttatttataagagagagaggcgttttttttattcgttttggaaagttagaaatttatttttgtatgttttttttgttatttcgttttttagattttcggtttttgtttagagttaggggttatgtgagaatttatagtatggaataatatttttattttcgaagtagtaggtcgtaacgttataattgtatttcggttttttgaatgtgtggtcggggagcgtttgatagtttattttgggtttgaggtcgttcgttgtttatttgtttttttttattttttttgaaatattttaaatgtgtaggagtgttgagattttttagttattttggagaggcggggggtagggggttttttgcggaaaatgttttaggtttgggtggttttttaagtagatgaaattaagttttttttttttaagaaaagtaggtatttttttttttatgttttggatattttgaattatttttaattaagtgagtttgtggatatgggaattgtaaaattatagatattttagatgcgtgtatattttcgtcggtttgggagttcgggttttagaaatgtagttattgttgttattaatagtatttcgtattttttacgttaggttagggtatgttttgtttgaattttagtatttgggtttatcggatagtttagtttttattgggttatttgtttacgtcgtatttggggatttgggggtttagtatttaagaaatttagtttaataatatagtttttttgggaagatgtcgggttcggtataatagttattttaagttatagtattattttcgagtgtttttttaaaaagtatttggtgagtgtggatatatttatgtaattgtttttttttagggttggtatggagttttattagattagtatagggttagttaattgtatattttttatttttacgtatagtgtagtaaatatatttagttttttggggagcgtcgttagggtgtacgttttattaaaatgggaatttaagggataatggtaggagagtagttagaaagtgcgtatgttttcgtgattgtgtttagagtttatcggttttagttttagttattgtttttttaatgtaattatttagagttatatgattaggtttagaaatttttaggtaaggaggtttttcgagtttttttaggaaatttaaattagggtttggttatatttttagttaggaagtttattttcgtatttaattaattgttttaattgtatattatttattttttttttttttttgtttttagaggagatgggaaatagttgggtattattttttaagttataattattttttttatatttaaggataatttagttgttttttggtttttttttttttagtttaaattatttttttttagttttttaattatatttcgagttgttttttgattatagttaagggttgggtttagtttggggttttaggattttaatgaggttttattgttataggatagtgaggaggttttttattttttttttttagggttttagggtttggatatatagttttagaaggggtattgggtagagaagatgtacgtcggtagtagagaggaaattgagttgaaatttggtaagaataaaagaattataaaggtttgtgtatttagtaaggtgtatttttttacggttataaaagaaggtaagatcgattgtaggtttggttaaagggatcgtttgcgtttttagtgtataacgagatttatagtgggtcggtgattttttttaaaataaagatatgtttatttggaattttaaatgtgatttgattttgtttaagggtttttgtagaaagaatttaggtaaggattttaagataaggtgggttttaaatttaatgttgtgtttttttaagagatagaaaagaaagtatagagatatagaaaaaggttttgtgaagatagaggtagagatcggagtgatgtagttataggttaaggaatatttggggttattagaagttggaagaggtaaagaaaggtttttttttggagtttttagaggaagttggttttgttggtattttgattttagatttttggtttttagaattgtgagaggatatattttttttgttataagttatttagtttcgatagttgttatagtagttaggagaaattcgtgttttatttttatttgtattatgttttgaggttaaagttttatatagtaaagatgtttaagtaattataaattttgtgggtagtttattcgtttagtagattattgttttaagggaagggggatggggatagggaagagagttataggaaatttttgtacgtttttttggaaatgggaaggagtaggtttggagagaaattttataggttaggtttcggggaaatgaagtttataaagcgtgggaacggagtggggaggaaatttacgaggaagtagcgtttggcgtatatatttatatttatgatttttttttaggtatagtttttatggagaggtttagttggtagggaagtaaaagaggttcggagagcgaaggaaggtgaggggtttttttttagtaatattgaggttttagacgggatattttattaggtggtaggttgtgtttttatagatagagattttttaagggtagggtttagatggttttatttttgcgtggtttgatataaagtaggttttttagagttgtcgagttttgggttcgttagtggtagagttttttatagttttttaagtttttatagttttttattttaggaaacggtgttattatttatttagttgtttaagttaagttttcgggtattattgttgattttttttttttttttatttttagtatttaaattatggtgcgtttttatttttagtttttttgcgaattagtttgaattttttttttttagtagtgtgttagttaacggttaataatcggttatttggggttagtaaaagtaataatatttagtttttcgatttgtagcgtttgtttatttttgtggtgttaatatttttgttttggttaattttttttttttttttttttttttgatagggttttattttgttattcggtttggagtgtagtggggtaattttggtttattgtaaattttattttttaggtttaagtgatttttttgttttagttttttaagtagttcggattataggtattcgttattatttttggttaatttttgtatttttattagagatgaggatttattttgttggttaggttggttttgaatttagatgatttgtttgttttggttttttaaagtgttgggattataggtatgagttatcgtgtttagtcggttaattttaagttatttgtatgatattattggaggtgagattgagaagagatgtttagttattacgaatatagtgtttttattatataaatataattttaagaatataatcgtaataggatagataatagttaaatgttgtaaaaaatttaagaggtgatgaaagttgtgtatttattattttttgttttaaatataattatttataagtaattttttaatgttttgtttaattttttttttataatttgtaatttaatttatattgtaaaaatttattatttttttaatagagtaatgtatttttattgtgataaaatatatgtaatataaaatttattatttttggttagttattatggtttacgtttgtaattttagtattttggaaggttaaggtgggtggattatttgaggttaggagtttaagattagtttggttaatatggtgaaattttgtttttattaaaaatataaaaattagtcgggcgtggtggtaaacgtttataattttagttttttgggaggttgaggtacgagaatcgtttgaatttgggaggcggaggttatagtgagttaagattacgttagtgtattttagtttgggcgatagagcgagatttcgttttaaaaaaaaaaaaaataaaaataaaaaagataaatttattattttaattaagtttttatgttagtgatattaagtatatttatattgtatatttattaatattatttattttcgaaattttttttaattttttaaattgaaattttgtttttattaaataataattttttattttttttttttttagttgttggtaatcgttattttaatttttttatgaatttgattttatataagtgaaattatataatatttgtttttgtgagataggtttacgtagtatgaggtttttaaggtttattatttaaggtttatatgtagtgatagaatttcgttttttttgaaggttgaatgatattttattgtgtgtatatatattttgtatatttattttttttatatttgagtaattgagagtaaagttgttataaatatgggtgtgtaaatatttgtttaagtttttgtttttattattttattattattattttatttattattagtattattattattttagatagttttattttgtcgttcgggttgtagtgtagtggcgtgatttcggtttattgtaattttcgttttttagatcggagtaatttttttgttttagtttttcgagtagttgggattataggtattcgttattatgttcggttaatttttgtttttttagtagagatggggttttatcgtgttggttagggtagtttcgaatttttggttttaagtgatttattttttttagttttttaaagtgttgggattatagacgtgagttattgcgtttagttattattttagttttaaatattatagtaatttttttattgttttatgagattttttgagatagtggttttagggattttatatatatttgttcgattttgtgtaatgataaagcgtagttttttttgtagaatggtagagtcgggagatttttgatggggtatgagtttaaaggggtagaggggacgtttagaatatatatggattttttatgtgcgttttgttagttattaagtagatttgttttagtttcgatatgtttaggattatagatagtgtatggtttttatttgggttaagttttcggaattttttttttttttatattatttgtattgggagtagttattaggttgtggattattaagttttttttaggttatttgagtttgtatttttttatttagtttgattgagtcggtgtgtagttattatattttattatattttttgtttggtcgttttaatgtaattataaggttttatttaaagaagtatatgattaatttgttttttagattttttagtgatttttttagtttgttttgtgtagaatatttatagtaaaatttgattatagcggtttgagtttttatttttaaggtaggggattttttaaataaagtattagtgttttaaatttatgattttttaaggaggtttttggtttttagtatagtaaatgttttgttttatggtttttcggttttttatttttattttattcgagtttttcgtttcggtatttgggattgaattagtttggagttttttagttttgttgtttgttggttttgatgatattattagggattgtagtattgtttggattttttgttgttatattttattgtaataatatttaatttgatggaattttgggagtaagtggtaggggtagggatggtggtggttaggggttgtatatatataggatagaaggattgaaggattgggtggaaagtatgatttttttaagatgatttttttttagtagaattttggttgtgttttttgaatagtatttgtttatttgtatatttggtgagttttgtgattagtaaatttagatgtttgggaggttattagcggttttgttgaggtataatttagatatgatagtttatgttttttttttgatttttttttttttatatagttttatgattagagcgttttttttatttttgtttttattttagtttcgtaagatatagtcgtgaaatggttaaagtttttaattttttagtattcgtttgagattggagtataaaaatgagatggggatatagtattttatggatattagtgatggaaaaaaattttttgattttttcgggagttttgtaaagttatattaggggataagaaggagtggttagtttggtatcgatttagttttaaagtagttagtgattaaagtatatagttggtatttttttatttttagggtattaggaggtttggttagaatttatgttagttaggagaaataggttgtttttggggtttttggtgttttggtttttttattgtttttttgaagaaggtattttgttttgtggggtttgaggttggaggtaatttgttatcgatgtagtgtagggatgagggttgagttattagtttgttttagttttacgttagtaggaataatagggatttaagtagagaagaaagtatttatttttaaagttattatagtgattgaggcgacgtggtttttagggagtttttttttttgttggttttttgtggatcgcggttttatgttttaataatgtttttgtttatttcgtaaggtttagtaggtggaaggaaagagggtggaggttgggagtggcggtttggtaattcgggaagggtagggagtaggaatatgtttttttttttttgtattcgtttagaaggttttatagggtttgttttgttatttataattttagggagatttttttttaatgtttgttttataaatgtttatttattttatatttgaatatttttagttatagggagtttagtatttatttatgttatttattttatttttggttgtttaaaaaagaggaaagagagagaaagaaaagataggaaagatagagaaagggggaaagagagagagaggaaagaaagaaagaggaaagaataagataggaaggaaagaaaaaggaagggaacggaagggaaggaagagagggaagaaagagagaaagagagagaaagaggtataaataaggtaggttttatggagtagagatttaataagggagtaaaatatatttgtagttaggttgtagatggatttttataggagcgtatatttattttatttttttcggaatagaaaagtggaaagaagatgtagcggtgtgggtgggtggcggttttttttgggggtttggaatgtggggtattagtttttttggttttgagaaggagattaagattattaatatttatagtggagatcgaattatataagggttggggatatcgttttttttgtatttttaataaagattcgatgttttaattatgggaatttgtggaagaagaaataaaattggttttggggttttttagagaattggttttttatttagtggtggttgtgaagaaatttttggagttagttttagcggtttgggtttgtatagttgagattgtttttggaagttgagtggaagtggggagtttttaggtatagttgggttttgttttttattttagttagtagttttaggatttttgggtgttttagagttttttttagagggtaaatttagagtatgagggagcggggagatgtttaatattgggggatttttgttcgtttttgtttttagtttcgttgatttgaatagggaggttatgggtgtttaggggtagaattgtgggttggtaagtttttagttttggtttttttttgtttttttttttttattgttattgattatttttggttatatgttgatatttttataggatgatggagaagagagaagaggaattttttcgttttgtttagtatattttaaagaggttttagtgtaaaggtatcgacgtttatagttaaatgtgtgtgggggttttttaggagtgggacgtttttatttcgttttagattgttatgaatcgatagaaggttttatgttattaaatatattttattaataaattattttaatatttagtaaaaaaataaataaaaatgtatgtatttcgtgttttgtagtgtttttatgtcgtatttttttttgtatttgagtttcggttcgcgtttttggtttgtcgttttgggaatagaacgttttgcgtgggaggtagataggaagcgcggggtgcgttggttgggtttttttagataatttggtattgttttttttagataatgaaattttttttattttgagtgtttttggaagttagtcggtagttagattaatttaaatgaattatttgttttttttgtgaagtgattttagggatttaatgggtttgttattaatatagtttttttcgtattttgttttttttttttatttttttttttttgtatgagttattggttacgatgattcggtttagttaagggatttggttagttttggttaggttatgtgagagatagtataaaggattaaggttgtcggaattaggttagaggttgagggttatacggattttttggagtgtttgtaattggggatttttaaggttgttttttggttttggggatttgtttatttggggatagttttaagggagatttttaaaagtagggagttaaaagggtgaattaatatagaaatattgagggttagggagaatttgaagatgggttcggttgggtatagtggtttatgtttgtaattttagtattttgggaggttaaggtgggcggattatttgaggttaggaattcgagattagtttggttaatatggtgaaatattatttttattaaaaatataaaaattagtcgggtgtggtggtaggtgtttgtaattttagttatttaggaggttgaggtaggaggattgtttgaacgtaggaggtagaggtggtagtgagttaagattatattattgtattttagtttgggtaatagagtgagattttattttaaaaaaaaaaaaaaaaaaaaaaaaaagataggtttaaggtttggagagttagaagttatttttttatttttgggtggtttattttgagattgtattacgttagagaaagttgcgggagtgtttgtttataatttataagtaatattgttttttttttttattagtttttggttttagtaggtttttgattcgtgttttttttagggttttgggtttttttaagttggattttcggttgttggtgggatgattatgtgatttgttatttttttgtttatcgttttgggtagtttttgttatttggtgtatatagagtggagtttagtaaggtcggggtcgtcgattttttgttagttatatttgtttttttttacgttattttttttcgttttggttatgtttaggggtttatatttttttataagttaggtgttagatttttgtgtttgttttattttgttttttttgtttggtgggttttttatattttttttggtttgatttaggtttgatttgtttttaggttttagtttagaggttgttttttttaggaagtttttttgggatcgttagatgaagggatttttttttggattttttttttatttttatagttttaggaatagtttttaatttaggttttattgagttagtgtggtatttaggagagttataagcgtgtgacgaacgtgttgaagtttttttaaaagttgaaggagttttgtgaatatatagtagtattagtttagattgcgaaggtataggggagttagttttttttagtttcgtttgtttttggttttttttttgaggaggtgggagttagttagttgggattaggaggtgggttttatggagtagagatttaataagggaataaaataaattagagaatttttttgttgtaaggaatttagataaggagtatttagttagaggaggaaggaagagatcggtagtagattttttttgttttagtagttttgtaagttagatgggttaattttttagtatagttgttttttagtatagagaaattttttatttttagtaatagggtgggaatatttttagatagggttacggttattttggttatagggattacggagtttgagtttttgtggtttgttttatttatgtggttatagattttgagtatatatttggagttatagagtttaaagggtagggtagggtagggaatttgtttgattggtgaaggttattttattatttggagtataggtttttgtttttaaatttatatggagttttcgatacggggtatcgattttaaggaggtgaatgtggatatttaaggttagtgaatggttaggtgttaatatatcgataggtttttggttttttttttaatattgagggtaggaaataaatggggtttatatggtgtatatggtttttagagttagtaaggtgtgtaagattcggtagttgagaaaattgattatttggtcgggcgcggtggtttacgtttgtaattttagtattttgggaggtcgaggcgggcggattacgaggttaagagatcgagattattttggttaatacggtgaaattttgtttttattaaaaatataaaaaattagtcggacgcggtggtaggcgtttgtagttttagttatttcggaggttgaggcgggagaatggcgtgaatttgggaggcggagtttgtagtgagtcgagatagcgttattgtattttagtttgggcgaaagagcgagattttattttaaaaaaaaaaagaaaagaaaagaaaagaaaattgattattcgattatgaataagttagaatatttatttagaaaaaaaaaatagttttgtttaattggggatttaaaattttaggatttatgttttttttttatagagttatattatttttttaatgtttattttcgattttatttgtttgttaagttttaggtatttagaatatagtatgatagtaagttttgtgatttttataggtttttttaatttattttaggtatagttatatttttagttttgagtagtagggagtgatatgtagatggttatttagatagagaaagatttttaaaaggagggtaggttttgtttcgtaggtagtatttattgatatagatattagtaggtaaattttttaggaagatttttattaagaaagaacgaaagaggtttagtgcggtggtttacgtttgtaattttagtattttgggaggttaaggcgggtggattattttaggtaaggagttcgatattagtttggttaatgtggtgaaattttatttttattaaaaatataaaatttagttggacgtggtggtgggtatttgtaattttagttatttgggaggttgaggtaggagaattatttgattttaggaggtagaggttgtagtgagttaggattatattattgtattttagtttggggggtaatagagagagatttcgttttaaaaaaaaaaaaaaaaaaaaaaaggatgaaagataaataaggttgaaattggtaggttggtatatttttaataatttattttaggtcgggcgtagtggtataatgttagtattttgggaggtcgaggagggtagattgcgaggttaggagatcgagattattttggttaatacggtgaaatttcgtttttattaaaaatataaaaaattagtcgggtgtggtggcgggcgtttgtagttttagttattttggaagtttaggtaggagaatggtgtgaattagggaggcggagtttgtagtgagcggagatcgtattattttacgttagtttgggcgatagagcgagatttcgttttaaaaaaaaaaagaaataaaaaataaaaataataaaaaaaaaataatttattttagtagggagtaggaggtaaggtttgatatgtagtgtttgttaatttttgtggtgtaaatatatttattgtggtaaattttaagttataaataggatattattaaatatagagttgggaaaagatatgtatattattggataaaacgtttaggtagttacggtttatttttttttgggaaggggggtatgtttagaatgttttttattatggagaatgattgtggtaaatagggtttaattggtaggttgatttaattaattgtttattgatgtgatgtggggtaggtttttgaggttgtttttatgtttagggaagaaggtggttatgtggttatagatttggttttgggtttgttttttttttttttttttgagatagagttttgttttttttttttaggttggagtgtaatggtgtgattttggtttattgtaattttcgttttttgggtttaagtaatttttttgttttagttttttaagtagttgggattataggtgtttattattatgtttagttaattttgtatttgtagtatagatggggttgttggttaggttagttttaaatttttgattttaggtgatttatttattttggttttttaaagtgttaggattataggtatgagttattgcgtttattcgggtttgttattttgaggatatatttggagttatgtgtttatgattttttttttattttaaaattttgattttattttattgtttttagagataggttttgttttgttatttaggttggagtgtagtggtgtaattatagtttattgtagtttcgaatttttaggtttaagcgatttttttattttagtttttcgagtagttggggttgggtttataggtgttattatatttagttatattttatatttttttgtagagatagggttttgtaatttgtttaaattggttttaaatttttggttttaagtaatttttttatttttagttttataaagtgttgggattatagatgttagttagtgtatttagtagttattatgattgattggtgacgtttgttttagttttaggatgaaagagtagtagtattttagttaagtatttgtggtttttgattggaagacgttttttttgttttttaagtatagtgtaaatgttatttttttggtaagtttttttttaattttattttttttttggtatagggtttgttatagttttgtttatataaagagagttattagtgtatgtggtatagatgttagttgtttttttaatatttgagtttttttttttttatagtaattgaagttttggttgtgtatagggaagtttagttgaagaatatattgtttagtttttttgatgataggagcggttatataattgggttttggttagtgggaaggagttgaagtgtttaatttttaggttatgtttttaaaaataaagagggatatttgttttttttttttttttttttttttttttttttggttggagtgtagatatgacggtaggagttggaattattttagtttaagagatggaagttgtgtgtcgaggatgtattaaaggaatgaattaggttcgggttgttttgggtttttataacgattgatatttggattgggacgtgggttcgagtgttgtttagtttttgatgttttagtttttgttatatagttagatggtgttttgattaatttaaggtatggttattattttatttgtttggtagggtaggggttttatttttatacgttgagtttttggtagaatttggtgtaatatatatagttaaagtaaaatgaataggttattttaattaaggtttattttgtgggttggttttggtatttggttttaatttttattttattttatttatttattatttttgagatagagttttatatttgttgtttagtttagagaggagtggtgcgatttcggtttattgtaatttttattttttaggtttaagtgattttcgtgttttagtagttgggtagttgggttttttttgagtagttgggattataggtgtacgttattatgtttggttaatttttgtattttttgtagagatggggttttattatgttggttaggttggttttgaatttttgattttaagtgatttattcgttttggttttttaaagtgttgggattataggtatgagttatcgtgtttagttagttttggtatttggaattggaaaataatagtttgagttttagaggggataaatataaatatgaggtagaaggaatagtaagtaaatacgtgtttagagtaggttgggttgtttatatttttaaaatatcgttaggtgttgaggtttgggttttgtgttagatttttgggtgtagatttcgtggggatatttattgggtagtgggatttttggtaagttatattatttttttgagttttcgttgattaagttgtttattgagaataatatttagattgaaaggatttataataatatgtgaaaagtgtttggtttaaaataggagtttggtaattggtagtttttattatttataatatatagtttaacgttttcgttttataggaatgaaaataggatttagataggtaaaatgatttgttgagggtcgtatagtgttaatgatagagttaggattagggtttggggttttgattttttttgtagtattttggttttgtgagaagtggttttgggtgaatataaggagtgaggagttggtgagaaattttgaaaatgaagttgggtgtggtggtggatgtttgcggttttagttatttaggaggttgaggtaggaggattgtttgagttcgggagttggaggttgtagtgtgttatgattgtattatcgtattttagtttaggtgatttagtaagattttattttagaaaaggaaaggaaaggagaggggaggggaagggagggaatttttgatagtgattttagagataattaggatgatttgaaattattttgaaatgtattaaaaaataaaaataaaatggatttatggttaggcgaaggagggatagatggacggtgaggtgataaagtaggtgtagtttggtgttagtggtagaatttaggtgatggttgaatgtgttttttgtaaaatgtttttaatttgattatgtgttttgaatatttttataatagaatggagggaagagaaaggtaagagggagttattgtagttgttgtagtaggagtagattttaaaatattatgtattagatttttagttttgtttttgtggatgtgtttttgtttttttttttgggatttaaggatatttaatgagcgtatgtgtttttaagtttttttgtttttttatttgtttttatatttggaagattttataggtggcgtgggttagttttttattttgttttttgtgtttttagtgtatgatagatattgagtgagtgttagttttttttttcgatattttgtttgtttgtttagagaggtttttttatagtttagttattaggttgatgtttttggacgtttggtcgatagtttttttagttgtgttttagtgatttggtaggtgttttgagttataaataaggttattagtggatgtttttaaagttttttttattacggcgttttttttttttttattaatagttcgttatgatagttagtttgtatgagtttttttttagggttgtgttttttgaggttgtttagcgtttggtttgttagagtttattagatagggtgtttattttttttaggtttgagtttttatttagagaattatttatagaaggataatggagaaaggtagttggggtattaaatggagtgtgtttgtatgtggggggggaggggagggggagggaaagtaggaagagaagatataagaggagaaataagaataagaggaaatatagaaggaggaggagtagttttttttatgggggtggattttgtgtttagttttttattaaggatattatatttattatttcgtttggtttttacgaatatttttaaggtcgtttttttttggtttttatttttttattaggaagcggaggtatagagtgagaaagagttgtttaaggtttttaggtagtttacggagttattgggagttatatttaattcgtttaattttacgtttttgtttttagttattataataaattattaaggttttatagttataggagtttagttcggagtttttatcgggttttttaaggtagggagatggggttggaggttatgttaggtgtacggtgtttagagttgtttaggaagtttcgcggtgcgggttgggtattaggtagtgtttgtaggatggagaaatgaatgaggttgagatatagtgtcgttttttttaaacgtgattttttttgagtttttgtgattggttatttgagagggtagttttggttttttggcgtttatgttcgggtttagagatgttttttttagttaggtttttttttgaggatggaaatttagaattttattataggaggaagagttgggagtattttattttttttttttttttgagacggagtttcgttttgtcgtttaggttggagtgtagtgacgcgatttcggtttattgtaagtttcgttttttgggtttacgttatttttttgttttagtttttcgagtagttgggattataggtattcgttattacgttcggttaattttttgtatttttagtagagacggggttttatcgtgttagttaggatggtttcgattttttgattttgtgattcgtttatttcggttttttaaagtgttgggattataggtgtgagttatcgcgttcggttagggagtatttttaagatttttgcggagggttgtttaggtttaagttttttattatggaaggttttttagatgcggtagttacggtgtatgggttgagggtttttatttattaagaagtaggagtatttgatgtatatttagtttacgatttttatttatttgggggttgtgtttgtagttacgtgatataagggaatagttatagtagtgggttataaagagagtgtgggttaatgtgtaggggtagaattttgatagttttttatgggttggtagtagggaggggtatatttgtataaattttatacgtatagttttttatatatatgtggttgataattatttatatatttaagacgggatttggcgtatagtttattagtaataggcgttggtaatttttagttgtttttttgttgcggcgtagatattatttaaggtgggatggagagagttattgtttttaaggttatatattttaaagggagatgttgggttacggaatgaaaataggaggattagttagagttattggttttgagttatataatgggatatataggtttatttattttatatttttattgagtaattataacgagttaagttgtatagattatttaaataatcggtacgtagaaaagtattttaatttttttttggttttgacgtgatgggaagaatttggatttttggagttatagagttggatggaaattttggtttagttaattattggttgggggagttcgggtaagtgatttaaggtttttgagtttgtttttttgtaaaagagtagtgttcgggtttgttacgttaggttagggtaagatgattgaagagtaagcgtttagtatcggttaggggttaacgtttttaaggacgtaaagtgtaataagtaggcgttacgattgtatcgttttttattgtttgtggtaaatatataagtaaagatggtttcgcgtttgcgttgggggaggtagggaattggttttaggaggacgttggtttttttagttgttttttttaaagttttttgggaggagaaatgatttattttagttgttgggagttttaatttataagtaggtttgtttattcggtagcggtcgtatgtaggtaggaggggtttcggtagtttttaagagtgaggggtcgtttagtttttttttagttggaaaggaggttttaggttgggtaggagtatttggggaaatttagtttttggagttaggttatattagggagatgaggttgttagaagtttttttggtgtttatagtaaaatataattaaagtgggatttagattttaattagtttaaggtttgatttatattagagggaaattagcgtttgtcgtatgagtgagcgtttatgtgcgtgtaaggtagagatagattttgggtaagtttttttatttttttacgtttgtttttttatttataaaacggggtaatattatttattttatagggttgttatgaaataaatatgtattaatatttgtaaagtgttgagaatagtatttggtataaaataagagcgatagatttgttaaataagtaaaaaataagatataagtttaaagtagagtttggtatatcgtgagtattaagagttgtgttttttgattttttttttttgtggagatttttttattagaagtgggagggattgtcgaggttggagttttgttttagggatttttgtggggagttttttagtttagagggatttgttttacggattatatttgtttcgggttttcgtgtttttgtgtatgtgtgtatatatgtgtgtatatatatgtaatgtgcgtgtgtgtatttttatggatttgtgataatttgtatatatatgtttagaatttatttgatatagtgttttattaagatgttggagtttcgatgaatggattgcggggttgagatattgtttttataggaagttgttttagtagtaagttttttggtttttatagataattaaaaagaatggagtttgtttttattttttgttttaaaaatgatgtatagtgtgtggggtttgatgttggaggtttttttagtagatatatttttaataatattatattttgaaatttaagttgtcgtaaaataagataagtaaagatggtattggtagggatttttgaggttttttttatgtatttttgaataatttttatatggtttttgtttgaatgtttttaggtatggggaatttattattttgtgaaatagtttgttttatcgtttttaagtgaatattgtgagaaaaatatttttttttgtaaagagttaagttttattcgttagtattttttaggtatttggtattagttttatattttgggggaatttaaaataaatgttttttttttattagataatttattaattatttggagatagtggttgtagttttttgttttatgtagttattttatttagtttttttttggaatttttgacgtgaatataagtttttttgttacgtaggttttttttttgggttttttatttatttgcgtatattttggagaggtcgttcgttttgtgggtgagatttattgtgggttgaattgtgtttttttaaaagatatatgtaagttttgattttttagtatttatgaatgtgattttatatggatatagggtttttgaagatgtaattgggttatttgagggtatattgaattagagtgggttttaaatttaatgataggtgtttttataagatagaggtaggttgggtatagtagtttatgtttttaattttagtgttttgggaggtaaagttttattgtttgagcgtaggagtttgagattagtttgggttttcgtttttataaaaaaattaaaaaattagttaggtatggtggcgtgcgtttgtgttttagttatttggaaggttgaggtgggaggattgtttgagtttgggaggttgaggttgtagtgagttatgattacgttattgtattttagtttggaggatagaatgagaatttgtttttaaaaataaattaaaaagataatagagagggtagtttggatagagatataagaagagatatagggtgaaggttaggtggggggtaggtcgagttgtaagtcgaggaatattaggggttgttggtcgtcgtagagttcggagaaaggtatgggatagtttttttcggaatttttaggaggaatgaatttttagatatttcggtttgggatttttggttttagaaattttagggaagatatttcggatgtttttgtttttgtttttgtttttgtttttgagacggagttttgttttgttatttaggttggagtgtaatggcgcgatttcggtttattgtaatttttatttttaaggtttatgttatttttttgttttagttttttgagtagttgggattataggtatttattattacgttcggttaattttttttttttttttgtatttttagtagagacggggttttattatgttagttaggatggtttcgattttttgatttcgtgatttaatcgtttcggttttttaaagtgttgggattataggtatgagttatcgtacgtggtcgatttcggatgttttgagttattttatttgtggttttttgttatgatagtcgtaggatagtaatatagggttttagtagggtggttcggtaagggttttttttttacggtagtttttattttgttttatttgtagggttatttagatgtttatttcggttttggttagtaagtgttagtgtatttttttacgtttagtagtaagggtagtatcgttgttgattaagtatttgttatgtcggggtttttgtgtggttttggggttttttttttttgtttatatttggtagtttagtttttttttttgtattttatttgatgtcggggttttgggtaagtttgggggatttgtgttttattttatagattttttagttgattttattagtttttgtatagggttcgtttgaagggtcgttgggttgggcgttaattagagtttttagtagtagttttttcggttttttgattttggtttatgttttaggggtagggtttttaagggttttggggtcgtttttgaggttagtttttttgttgatcgtagtttatatagaggagggtttaattttgagtgtggtcgttcgtgattttgagagatgtttagagttgtagacgtgttttttaagttttttagagttcgggataggagttatttaatgtttttagtgttataggtaaaatttgttttttttaatataaattgtttttagttttatttaatgttttttttaacgagtagtaataaaaatatggttttttgttaaaggtggggtttatagttttttagaattcggttttttgttaggtttaggtataatttataggagtgttcgtttttgattcgtgtgtgtgtgtgtgtgtgtgtgtgtgtgtgtgtgtgtgtgttgtgtgtacgcgtatatgtgtttgcgtaagtttttttatgtgtagttttgggaagggtggagaggtttacggaaattttttttggtatttagtaagttagaaaaaaggaaaatgagatttgtgtatatatgtgtaagtgtatatatagtatataggtatatatatatatatatttagtatatattatataggtttatacgtgtatatatgtgtaggtatatattatataggtttatacgtgtatatatatgggggtatatagtatataggtatatataggtatatatatttttttgtaggaaagtttttttttgttttttattttgtagggtttttaggttttatgaaataagattgaattttggaagtttgataaaaggtttgtttggagtattttggttatttttattagtttttttagttgtggaaggtatgtttcgtggtatttatttattttttgtttttatttttattttcgttttcgtttttttttttttgtttttttagtttatatgttgtttgttttaattttaatttttgtatttggacgggaattattttttttgtagaagggtgtaatgtatgtggggatatatatatatatatatatatatatattgtattggaggagagaagagaggtagagttttttttagatttagagttttagcgagtgacgggattttttttagagaatacgtgtagaagtttgcgttattggaagaagatattattttgatttatatttttttttttttttttcgttttttttatagagaaggaaaggttttagtaaatagtggttatgtgggttttttgtatgttattggtagttttttagttaggattattttttttttatttttggaagtataagaatagagagaagggtgagtttttgtttttgggggtttttttttgtatttttttggagttaattttagggttgtgggttgtataggaaggagggtttaataggtttttcgtttaattttgtttttttagtgaggagtcgatttattttgtttgtaaaagatgttggttgggatttgatgttgggtaatttgaggagaagagaagggggataggggttgaggttaggtttttggttttgaaatagttataatttttggggtagagtttaagggtgttaggttggagattttatattcggttagttggtagttattattttggtttagttagtggtttagggtattatagttatttagattaggaattttatttttttggattgtattaatgaggaaggttgagtttgtaggttttatatatttatggtaattttaaggtagagaggttattgttaattgagggttacgggtaggagttttgtgagtttattagtaagtttggaagattaaggtttttggttatagagagtagttgttatttggttaattttgtagaaaatattatagttttggataaaatatttgaaagaataaaataataatagtttggagttagtatagaatattttaagtaggtagaagttggagtagagtttatatttgatagaggggaataaaattagataagtttttggtttttggaggtttttttgtttagaggtaggtattgagtaattaaatttggataaaaagttttaaaagtatttagggaaaaataatatgtggtttataggggaatagttagatgaatgttgattttttgatagaaataacggaggttaaagatattggaattttatattttaaagttttgaaagaaaaaattgataatttagaattttataattagtgaaattatggtttaagaatgatagtaggttgggtatagtggtttatatttataattttagtattttaggaggttaaagtaggtagattatttgaggttaggagttcgagattagtttggttattatggtgaaattttatttttattaaaaatataaaaattagttgggtatgatggtatatgtttgtagttttagttatttgggaggttgaggtaggagaatcgtttgagttcgggaggagaaggttggtgagttgagattgggtaggagttttgaaattatattattgtattgtagtttgtggggagatagagtgagattttgttttaaaaataaaaataaaaataaaaaaagaaagaatgatagtaaaataaagatttgtagataagtgaaaatgaaagggaattagttgtttgtaaatttgtattataaaaatcgtgaagtaagttttttaagattatgggaaatgagattagatgggaatttagttttttaggaaggaatgaagagtataggatatagtaaatatatgggtaaatagaaaagattttgttttatttttaatttttttaaaatgtatggggttgtttaaagtaaaaatttttttattgtattgtttagtttataatgtgtatggatgtagtaaatatttaataattattatatataggatggaaagtggtaaatgaatttataggattgtttagtttttatattttttttttatgaagaaaaataatgttaattttaagtagattgtgaaaagttaagaatgtgtaatagaatttataaagtaattattaaaatagtaatataaagagatataattaaaaagttaaaataggtcgggtttagtggtttacgtttgtaattttagtattttgggaggttagggtgggcggatcgtttgaggttaggagttcgaggttagtttggttagtatggtgaaatttcgtttttattaaaaatataaaaattagtcggtcgtggtggtaggcgtttgtaattttagtatattagggaagttgaggtaggagaattatttgaatttaggaggtagaggttgtagtgagttaagattatgttattgtattttagtttgggtaatagagtgagattttgttttaaaaaaaaaaaaaaaaaaaaaatataaattaaaatagaattttaaaaaatatttaattaatataaaagaagttaagaaagtaagatgaaagaaataaatattaaagagtaaggtagtagttttaaatttagttatatttataattatgttaaatagaaatagtttgaatattttaattaaaaggcggaggttgttagaatgaataaaatagtaagatttaattatatattatttataaaagatgttgttttagtataaatataggttgaaattttttgtttggaaaaagatatattgatgttgtttgaatgatgatggagttatgttttgataaatttattataagtggaaaataaatattattttaaaaatgtatttaatatatttaatttatcgaatattttagtttagtttagtttattttaatatgattagaatatttattttagtttatagttgagtaaaattaataaatataaagtttattttataataaagtgttgattattttatgtaagttattgaatattgtattgaaagtgagaaatataatggttttatatatatttaaagtatagtttttattgtatatatattacgttcgtattatggtaaagttgaaaaattgtaagttaaattattataagtttttttataagtttttttagtttttttatgtattttaaatagtatgtttaagaaggttggagaggttatataaatattaataaagttgagtttaagataaaattattacgagataaaggaatatatttattatggttaaatgattagtttatcgagatattattataattataaatgtgtatgtatttaattaaaggagttttaaaatatatgatataaaatttgaaagaattaaagggagaaatgggtaattttataattataggtggagattttttttttttttttttgagacggagttttatttttgttgtttaggttggagtataatggtgtaatttcggtttattgtaatttttattttttgggtttaagcgatttttttgttttagtttttcgagtagttgggattataggagtttgttattacgtttagttaatttttgtatttttagtagagataaggttttattatgttgtttaggttggttttaaatttttgattttaggtgatttattcgttttggttttttgaagtgttgggattataggtgtgagttattgcgtttggatgtatagttggagattttaatattattttagtttatttaggatgttaaaataaaatgttttaggttgggtaatttataaatagattgtagtgtttatagttttagaggttgggaagtttaaaattagggtgtttagtgtttggtgagagttagttttttgttttagagatgttttttttttgttgtgtttttatatggtagaagggattaattttatttacgatgattttgtttttatgagttaatatttttttgatgttttaatttttaatattattgtattagagattaagttttaatatatgaattttgggggatataaataggtaggttatagtaaatattatttttttaatatttgagaaataagtattagataatttgaagaatattggtaattagtaattgatttaattagtagttataaagttttatatttaggaagtttagaatatatatatatattttttttttaagtgaaaatagtgtatttattaagatatatattttgggttataagttttaaattttaaaagtatgtaaaatatgtttgtttggttaaagtaagattaaattagaaattaatagttttaagatatttagaggagttttgattatttgtaaattaaataatatatttttaaataatttatgagttaaagaggaaattataagaaaaattttataatattttaaatgaaatgataatgaaaatatagtatattaaaatacgtaggttgaagttagtgtttagagggaaattgtaagtgtttatattagaaaagaagtaaaaaaaaaaaaaaaaaaaaaaaaaaaaagatttaaggatttgttttaagaatttggaaaaatgggttaggtgtagtgtagtttacgtttgtaattttagtattttgggaggttaaggtaggtggattatttgagattaggagtttaagattagtttggttaatatggtgaaattttgtttttattaaaaatataaaaattagttgggtatggtgggtatttttagttatttagaaggttgaggtaggagaatggtttgaattcgggaggtggaggttgtagtgagtttagattatgttattgtattttagtttgggtaatagagtaggatgtttttttaaaataaaataaaataaaataaaataaaataaaataataaaaaaaataaagaatttggaaaaatatgttagttatttatgtattgttttttaattttgtatatattttgttaggtttcgtttcgtgatattggatcgaggttttatgagtttttttttttggttaaatatagttatgttaggttttatttataggggataatattgtggggagttgttaggttttgttgaggtagtagtttttttttttggttttagggttttttttttttttgaaggtatagttgttagtggcgtgtgtttagtggggtttgttttgtattgagtttttttagtattttagttttagtttaatgggattttagtaaattttttagatatttagtttttgtttatttatattttttagtaggtttttcggttatttagtaagttgattttgtagatttattttttttatattttttggtaagaatttttttgttattagtaggttgtaggtttttgtggtagttatatattttttaataaggtttgaacgtaagacgtggtaaggtgtggaggacgtttcgagtttttggttttttttttattaattttagtggtagtaattgtttttgtgtgtttgtatatatgttttaaagtatttattatagaaaatttattattttaattatttttaggtgtgtagtttggtggtatgaagtatatttatattgttgtgtaattattattattatttattttatttttttaaattgtaattttatttttattaaatattaattttttatttattttttttttttttagtttttggtaatttttattttattttttgtttttttgaatttgattattttagggattttataaaagtgaaattatatagtatttgtttttttatgtttggtttttgttatttagtatgtttttaaggtttatttatgttatagtatgtgttagaattttttttttttttttttttttttttttttttgaggtagttttgttttgtcgtttaagttggagtgtagtggtatggtttcggtttattgtaatttttatttttttagtttaagcgatttttttgttttagtttttttagtagttgggattataggtatatgtttttatgtttggttaatttttgtatttttagtagagatagggtttcgttatgttggttaggttagttttaaatttttgattttaagtgatttgtttatttcggttttttaaagcgttgggattataggcgtgagttattatatttggttttttttttttttttaaggtagaataatattttattgtatagatggattatattttgtttgtttatttattcgttggtggatatttgggttgtttgtattttttggttatgggaaaagtgttgttataaataagaatgtagtatatttgtttaagtttttgttgttagttttttggagtatatatttagaagtggaattattggatgttatggttattttgagtttaattttttgagtaattgttatattttttttatagtagttgtattattttatatttttattagtagtgtacggggttttaatttttttatatttttgttaatatttgttgttatttatgttttggttaatagttattttaaagggtgtgaaattatattttattgtggttttgatttttatttttttgatgattagtgatattgcgtatttttttttgtgttttttggttattggtatgttttttgtggaaaaatgtttgtttattgggttgtttttttttgttttgtggtttagttgtaggagttttttatatattttggatattagttttttatcggatatacgatttttaaatatttttttttattttgtggattttttttttacgttattggtagtattttttgatgtataaaagttttaagttttggtgaagtttaatttattatttattttttttgttgtattttcggtgttatatttaagaaagtattgttaattttaatgttacgaagttttttttttatgtttttttttaaagtagttgttttttatatttgttttttttatattttttagagtttttttgtataaggtaaaataaattttatttttttatttttatttataatatttagtgttttagttttgatattagatgtgtggttttttttcgtcgatttttaagtaattttttaatatttagtagtttttaattgggtgttttgtaatttagtttaattttgatattaattagagttagtgtagattttataggttaagggttttattttataagattgtttttaattttagagattagtcgtaagtggtaagatattaggttatttataatttttgtttgatttggttataaatttgaggtttttataattttttttttaggtttaataatttgtttgagtgatttatagaatttaggaaattagtttatttaaaattgttgatttattataaatgatattttaaaggatataaatgaatagttaattggaagagatgtataagaaaggtatgaaggaagcggtatggagtttttacgggagggtatattgtttttttagtatttgtaggtatttaataatttgaaattttataaattttatttttttgggtttttagggaggttttattatataagtatgatatgaaatttttggttattgatgattaatttaatttttatttttttttgtttcgtaggaggtggatgggaaaggttgtaagttttagttttttaattataaggttgggttttttggtaattagtttttatttttaggttgtttaggagtttttagttattagtcgtttttttagtaaataaaaagatatttattattttggagattttaagagttttaggagttatatgttaaataaagttgggggatagagattagatagatagatagatagatagatagatagatagatagatagatagatagatagatatattgatttttgagatagagtttttttttgttatttaggttggagtgtagtagtgtaatttcggtttattataacgtttgttttttcgggtttaaattatttttttattttaattttttaagtagttggaatcgtaggtatatatcgttacgttaggataattttttgtatttttggtagatatgaggttttattatgttgtttaggttggttttaaatttttgagtttaagggattcgtttgttttagttttttaaagtgttgggattataaatatgagttattgtatcgagtttagtttaaatatattttttttatattataatgttatttttttgtgatttttttaatagttaattattttttatagttaagaatattttatattataagttgttatttaaattgtcggtgtggtttttgttttttgattgggttttgattaatgcgttgaagtaagtataaggaaggaagtaatgaagataatagagaaatttaaggaaatggatattagaaaaggggagtttaatgttggttttttaaaaagatttagattgataattttttagttaggttgttgatgagagggagatggcgaatataaagttataataaaaggaatgaagtgttttttttacggattttatcgatattatagtgataaggaatataggtatattttattttattgtgttttatagatattgtattttttataaattgaaggttcgtggtagttttgtattaagtaagtttgttggtattatttttttaataatatgttaatattgtgtttttgtgtaggagtttgatgatttttgaaatagtttaaatttttttattattattatatttgttatggtgatttgtgatttttttttttttttttttttttttgtttttttttttttgagatagagttttgttttgtttggagtgtagcggcgcgatttcggtttattgtaagtttcgtttttcgggtttacgttatttttttgttttagtttttcgagtagttgggattataggtatttattattacgttcggttatttttttcgtatttttagtagagacggggttttatcgtgttagttaggatggttttaattttttgattttatgatttgttcgtttcggttttttaaagtgttgggattataggcgtgagttattgcgttcggttttttttttttttttttgagatggagtttcgttttgttgtttaggttggagtgtagtggagtgtagtggtgtgatttcggtttattgtaatttttattttttaggtttaagcgatttttttgttttagtttttttagtagttgggattataggtattcgttattacgtttggttaattttggtatttttagtagagacgaggttttattatgttggttaggttggttttaaatttttgattttaggtgatttatttgtttcggttttttaaagtgttgggattataggtatgggttatcgcgtttagtgattagtgatttttaatgttattattgtagttgtttttggggtatgacgagttatatttagataagatagtgaatttatttaataaacgttgtatgttttgattgttttattgattggttgtttttcgttttttttttttttgtttaggtatttttattttttgagatttaataatattgaaattaggttaattaataattttataatggtttttaagtgtttaagtgaaaggaagagttattcgttttttattttaaattaaaagttagaaatgattaagttgagtgaggaaggcgtgtcgaaagttaagataggtaaaagtgagattttttatgttaaatagttagttaagttgtgaatgttaagaaaaagttattgaaagaaattaaaagtgcgattttagtgtatatatgaagaagaagaaagtaaaatagttttaatgttgatatgaagaaagtttgagtggtttggatagaagattaaattagttataatatttttttaaataaaagtttaatttagggtaaagttttaattttttttaatggtatgaaggttaagagaagtgaggaagttggagaaggaaagtttgaggttagtagaggttaggttatgaagtttaaggaaagaagttatttttataatgtaaaagtgtaaggtgaagtagtaggtgttgatggagaagcggtagtaagttatttagaagatttagtttagagtattgatgaaggtggttatattaagtaatagaattttagtatagatgttttattttttattggaagaagatgttatttaggatttttatagttagaggggagaagttaatgtttgtttttaaagttttaaaggataggttgatttttatgagaggttaacgtagttgttgatcgtaagttaaagttaatatttattgatcgttttaaaaattttagggtttttaagaattttgttaaatttattttgtttatgttttagaaatggaataataggttttatttgatagtatatttgtttatagtatggtttattgaatattaaaaatttattgaggtttggtgcggtaatttacgtttgtaattttagtatttttgaaggttggggcggggggattatttgaggttaggagttcgagattagtttggttaatatggtgaaatcgtatttttattaaaaatataaaaattatttaggtatggtgttatacgtttgtaattttagttatttgggaggttgaggtaggagaatcgtttgagtttaggaggcggaggttgtagtgagtcgagatcgtgttattgtattttagtttgggtaatagagggagattttgttttaatttgaaaaaaaataaaaaaataaaaaagggttaagtacggtggtttatagttgtaattttagtattttgggaggttaaggtaggtaaattatttgagtttaggagtttaagattagtttggttaatatggtggtgaaattttatttttattaaaaatataaaaattagttaggtatggtagtgtatatttgtagttttagttatttaggaggttgaggtaggagaattatttgaatttgggaggcggaggttgcggtgagttgagatagcgttgttgtattttagtttaggtaataaagcgagattttgttttaattaaaaaataataataaaaaaaaaataaatagggttcggtgtagtggtttatgtttgtagttttaatgttttgagaggttgaggtaggtggattatttgaggttaggagttcgagattagtttggttaatatggtgaaattttgtttttataaaaaatataaaaattagttaagtatggtggtgtgtgtttgtaattttaattatttaggaggttgaggtataagaattatttgaattcgggaggtagaggttataatgagtcgagattatgttatcgtattttattttgggtgatatagcgagattttattaaaaaaaaaaaaaaattattgagatttattgtttaggaaaaaagaatttttttaaaatattattgtttattgataatgtattttgtgatttaagagttttgacggagatgtatgtaaagatgaatgttgtttttatgtttgttaatgtaatatttattttgtagtttatggagaagggataaatttgatttttaagttttattatttaagaaatatattttataaagtagtatttgttatagttagtgatttttttaatggatttgggtaaagtaaattgaaaattttttggaaaggattttttattttagatgttattaagaatatttgtgatttataagaagaggttgaaatattaatattaataggagtttggaagaagttgattttaatttttatggatgagcggtttaagattttagtagaggaagttattgtagatgtggtggaaatagtagagaattagaattagaagtggagtttggagatgggattggattgttgtaattttatgattaaatttgaatagatgaggagttgttttttatggatgagtagataaagtggtttttggagatgggatttattttaggcgaagatgttgtgaatattgttgaaatgataataaaagatttagaatattatattaatttatttgattaattcgtggttagggttgaaagaattgattttaattttgaaggaagttttattgtgggtaagatgttattaaatataatgcgtgttatagaaaaattttttatgaaagaaagagttaatttatgttaaaaattttagttaagaaattgtcggttaggtgtagtggtttacgtttgtaattttagtattttgggaggttaaggtaggtggattatttgaggttaggagtttgagattagtttggttaataaggtgaaattttgtttttattaaaaatataaaaattagttaggcgtggtggtaggtatttgtagttttagttattcgggaggttgaggtaggagaattgtttgaattcgggaggtagaggttgtagtgagttgaaatcgtgttattgtattttagtttgggtaatagagtaagattttgttttaaaaaaaaagaaaaagaaaaaagaaataaagaaattgttgttatagttatttttaatttttagtaattattatttggttagtagttattaatattgaggtagattttttattaagaaaaagattatggtttgttgaaggtttagatgattattagtattttttagtaaaaagatataatgattttatatattttaatagattatagtatagtgtaaatataattttttttttttttttttgagatggagtttcgttttgttatttagtttggagtatagtggtgtgattttagtttatcgtaatttttattttttaggttcgagtaatttttttattttagttttttaagtagttgggattataggtatgtgttattatatttagttaatttttgtatttttaatagagatgaggttttattatgttggttaggttgtttttaaatttttaattttaaatgattcgtttattttggttttttaaagggttaggattataggtatgagttattatgtttggtttaaatataatttttatatgtattgggaaattaaaaagtttgtgtgacgtgttttattgtaatatttgttttattgtcgaggtttggaagtaaattttaggtatgtttgtattacgaataattttaaatgagtaaatttaataatttatttgaaagggataaatttttttaaagtataatttattaaaagtaagataaggggaagtaaaaaaatttgaataattttttttatatattaaattgaatttgtgattaaaaataaataattattttttttagtagaaaattttaggtttagacggtttttttggtggattttattaaatatttaaggaagaaataatattaattttatgaaaatatagaaaataaagagaagggaatatttttaaattaattttatgaagttaaaatgaggttgataaagatattatcgaaataaattaataaataaagaaaatattatattaatattttttatgaattaatacgtaaaaatttttaaaaattgggtaaattaaatttagtaatatataaaaaggatgatattttataagtaagttggattttttttagaaatgtaaggttggtttaatattaaaaaattaggtttgtatagtggtttatatttgtaattttagtattttgggaggtagaggtgggagtattgtttaagtttaagaattgtagattagtttgagtaatataatgagattttatttgtataaaaaattttaaaaattaaaaattagtttggtatggtggtatgtgtttatagtttttgttatttaggaggttgaggtgggaggattgtttaagtttaggagtttaggttgtagtgagttacgatggtattattgtgttatagtttgggtaagagtgagattttgtttttttaaaaaaaaaaaaaaaaaaaacggggggtaaaaattaattattgtaatttattttattaaacgaataaaagataaaataatgattatttttatagatgtagaaaaagtatttattaaaattatatttatttatgttaaaaaattttagtaaattaagaatagaagggaatttttttaatttgataaaggttatatatgataaatttaaagttaatattataagtttggtataggtaaggatgtttattaattattattatttaatattgaattggtagttttaattagtgtaataaagtaagaaaaaaaaataaggtattaagattagaaagaagtaaaattatgtatttaaattttaaaagatttataaaattattattagagtaataaatgattttggaaaagattataggatataagatttatatataaaaatttattgtatttttatatattagtagtaaataattaaaaatgaaatttaaaatttattttagtttaaaatagtgttaaaagtaaaatttttaggaataaatttaataaatggtatgtaagattttttttttgaaaattataaaataatgtaattttgtagagatttttttttagtagagaaataaaagaaatataaaaggatttttaaaacggagatatattatttatataaaagatttaatattgttaaaatgttaatttttttttaattgatttatagatttaatataattttaattaaaatttatattgtatttttgtagatattaataagttattttttaaatttataaggaaatttaaaggatttagaatatttaaagtaatattttagatatttgagagattttatattaagatttattgtaaagttatattaattaagatgtggtattagtaaaggaatggataaaatattaagaaaatataatagtgttttaatatagggtttatatgtatatagtatatatattaatataggattatatatatagttaatataggatttatatgtatatagtatatatattaatataggattatatatatagttaatataggatttatatgtatatatgtatatatattaatataggattatatatatagttaatacggggtttatatgtatatatgtatatatattaatataggattatatatatatatatagttaatatagggtttatatgtatatatgtatatatattaatataggattatatatatagttaatatagggtttatatgtatatatgtatatatattaatataggattatatatatagttaatatagggtttatatgtatatatgtatatatattaatataggattatatatatagttaatatagggtttatatgtatatatgtatatatattaatataggattatatatatagttaatatggggtttatatgtatatatgtatatatattaatataggattatatatatagttaatatagggtttatatgtatatatgtatatatattaatataggattatatatatagttaatatagggtttatatgtatatatgtatatatattaatataagattatatatatagttaatatggggtttatatgtatatatgtatatatattaatataggattatatatatagttaatacggggtttatatgtatatatgtatatatattaatataggattatatatatagttaatatggggtttatatgtatatatgtatatatattaatataggattatatatatagttaatacggggtttatatgtatatatgtatatatattaatataggattatatatatagttaatatagggtttatatgtataaatgtatatatattaatataggattatatatatagttaatatagggtttatatgtatatatgtatatatattaatataggattatatatatagttaatatagggttgatatgtatatattaatataggattatatatatagttaatatagggttaatatgtatatacgtatatatattaatataggattatatatatagttaatatagggtttatatgtatatacgtatatatattaatatagggttatatatatagttaatgatttttagtaaaggtgttaggtaatttaatagagtaaggtatgtttttttaataaacggtgttagaattggatatgagtatagaaaaataagaattaattttgattttaaattaaatataaaaattgatttaaaatggattatataatattttgacggttataataggttaaaaaatgtaaaaatttaaaaaattaaaaaataaaaggaattatagaatatataattataaaatttttagaaaataagagaattttttttgattttagtgtaggtaaagattttttttataggttataaaaattataaatcgaaattggaaaaagttgataaattggattttatgaaaataaaatatttttgtttattaaataatattattaagaaaattaaaaggaaaggagtaatgtggaaaaaaaaatttatgatatatatatttgataaaggatttatatttagaatatataaaaaatatatgaaataatatttttttttttttttttttttgagatagagttttgttttgttatttaggttggagtgtagtggtgtaatttcggtttattgtaagtttcgttttttaggtttatattatttttttgtttcggtttttcgattatttgggattataggcgttcgttattacgttcggttaattttttgtatttttagtagagatggggttttatcgtgttagttaggatggttttgattttttgatttcgtgatttgttcgtttcggttttttaaagtgttgggattataggcgtgagttattgtgttcggttaattttttttttaaatgagatttatggggaaatagttaaatgaagaaataataaagtagtaataaaataaaatttaagttttattttattgtgtagttgtaggataaagagtagaagtttgtagttggggaataaggtgtttatttttttaagtattataaaatgaaggttttagaaattattcgattttgaaataatataattttaaaaagaagtaagacgtggatagataattttataaaggaaaatacgtaaatgattaataaggattttggaaaattgtgcgattttataagttattaagaaaatataaaataaaagttttaaaaaaaaatgaagtttggaataattgaataaatatataaaacgataataaaatgaattttgattttttattttatattatatgtaaaagttaatttataaaagttatataattttaagttttttaaaggaaaatataaatatttttgtaatttggtagggtaggtaaaggttttttataaagaatatagagagagaattataaagaaaggagtttgttaaattagattttataaaaattaaagtgatatatttttgtttattggaaaatattattaagaaaatgaataggtcgggtatggtggtttatgtttgtaaaatcggtttttggggaggtagaggtaggaggatagtttgagtttaggagttttagatttgtttgggtaatatagcgagattttgtttttgaaaaaggaaagaaaatgaataggtaagttatagattggaataaaatatttgtaaaatacgtatttgataaaagattagtatttagaagaaaaagttaagtaatttaattttaaaatgagtaatagatttgaaaagatattttataaaggaaaaatatatgaagagttaattatgaaaatgtgtttaatcgtattagttattaggttaaagtaaattaaagttataatgagatgatattattatacgtttattagaatgattaagattttatagagtgatagtattaaatgttggttaggatgtggagtaattagaattcgtatttattgttggtgggagtgtgaaatggaagggttattttgggaaaagatttggtagttttttataaaattaaatgtatatttattttatatttattttaggtgtttttatagaataaatgaacgtttatatgtatagaaaaatttgtataagaagaattagcgtaataggtttatttataagagtttttagatggaaatagttaggggttttttaataagagaatgattaaaaatttatagaatgtttatatagtggacgttatttagtaataaaatagaataaatcgttggtatttgtagtaatatgggtagttttaagaaatatttaaattggtaaaattatttcgtggtggaaaaaaagtataattgtggttgttttggggaaggtggggattgtgatgtatttggaggggtatgaggaatttattggggtgatagtgatgttttatgttttggttaggttgggatatacgtggatatttttgttaaaatttaaagaacggaacgttttatatttgtgtattttagggtatatatattttattttaaagaaaaataaaaataattatagataaatgtcggattttagttaatgaaatgtaaattgaggtgttgataggatgttgtgtgttgatttttgtagtttattttaagtgtattaaaattagcgtggatgttggtggttagagggatttgtggtgaagtaaatagtaaaatggttgttgtggaatttaggtggtaggtgtatgggtgtttattttagaattttttatggttttttttttgtggttttgttttgttttgtttttgagatagggttttgttttgtcgtttaggttggagtgtattggtataattttagtttattgtagttttaattttttaggtttaagtaatttttttattttaatttttcgagtagttgggattttaagtttgtattattatgtttgattaattttttgtattttttatagagatgggattttattatattgttcgggttggttttgaatttttgggtttaagtgatttttttattttaattttttaaagtgttgggattatagttatgagttattatatttagtttttttttattttttttatgtttgaaaagttttacggtaaaaagttggaaaaatgtaaaaaagattgaaatttattaattaaaaataggaaaaataaaataaaagagatggtaggagattattttttttttttttaatttagtttttaatttttttttttttcgtttagttaggataggaattttaagggttcgggtttttcgtgtttgtgcggggaaggaggtattttcgtgtttgtgcgggggttggttatttgtttttcggtgtattttttgtattttattttttttcgttcgtagtgagtagttatagttggcggaaattatatttaggtagtttttgtttataaatttagtgaaaatgtaaatttcgtaggagttggattttcgagagtttgcggcgttatttgttggaggaaaggttttttgtattcgagttttttttttttttttcgttgttattcgtttttttgtttaggttgggcgggttttttttttgtaatttcggggtattggtgtacgggaaatgtttagtgttttataatttttttttatttatattttaatatttagtttttagtggatatcgttttcgttcgataaatatattatataggtatagtttaagattatttattttaggaggagtataagttttagtgtttattattttagtttttttttttttttttttgacgtagtgatataggtttaggatattgaagatttttgattttataaatatgttgaagttaattattttgaagttgtagtttttattattattattattttttattttttgtaaagataaagttttgttatgttgtttagtttggtttggaatttttggatttaattgatttttttgtttcggttttttaaagttttgggattgtaggtgtgagttattgtatttagtttgaagtcgtagttttttaattattgttaatagtaatatttatttttttgtgagtagtagggtttgttggtatggttgatagttttgtattattgtatcgaatttgttgtttgggattttaggtgagtttcgatttttagttggagggataagttgtgtggggttgggtagggtgaattgcgggagattaagtttagattgagggttataagttatatgagtattggggttaggtagggatagtgaaggagatagtgtaattttgaggaaagataacgttatagaatggagaggtttaggttcggggtttttttttgttgtcggataggtatgtttgtgttttttttttagttttcgtgatggttaagttatgtgttttttgagaggtaagcgaggtttttgatagtaggttttaggttttaattaaattgtttgttttgtagggtgagttgtataggtgtttttattttcgatttttttgaatttttgttgtttttaagttttatttattttttttaggtgaatagaaatattgtttaggggagaacggaggaagaatttaggaaaggttgttcgagagtttggttgagtttacgttatcgttaagagtagcgttaaaatttaggagttggtgagattatggtttagggtttatattaatatgagggggtgttagttttatgattaatgagtttttgttttattattttttgttatttatattttgagggttatagttagtacgtgaattggagttggttttcggtatttttttttttatattagttttataatgtgaggtgggggttcgtttttagaggtattcggagtagtaggtgttttaagagggggaagttttttcgaagtttttttttatttacggtataggacgtagaggggatagagtattaggaatatttagcgattataggggtttgtttcgaaggagaggaggtaggaggtagggagagtggttgggaggttagttttggagtgtttattttttatttcgagggagaggaaggaagtagaaggtgagtatagggagttttagttggggatggagcgggggttgtagttcgattgtgttgtttggagcgggggtatggattgtagtttttatttatttgtttggttagttcgaagttattttaagtttggagattttatttgttttgtttattttttttagggatggtgtttaaatttcgaagttttggttggtgttgtaaatatgggagggaggttttgttttattttagttttaagagttagttaagaatgttttggatatttgaattttgtttcgagttagaggttgggaagaaatttgaaggatggtgggacggtggatagtagtttttaggtattaggtattagggtttttgtttggggatgggggtattagtaggtgttaagtgtattatattagggtttattatgtttttgtttagagatttagtattttacgaaataggaaggaacgagggatgagcgtgtttttttttttaatattttagtttttgttttgaggttgttaggtatttaatttttttaggatttaaattattttggttttatttacggttaagtgtattaaattatagttaggattattgggtttagatattaaaagcgttttttttaaagtcggtagttattagggtagtatagggtagtgtaaggttgggtagggtcggttatttgttagtatttagtggtttttgttggatgttgacgggggtagttaggtaggtgggtttatttagtaattaaagagattttttttttttaattttttttttaaagagattttgattttttttttttagttgtagggtttgtagtagttttttttttagtaggtttttttgtttgtttttggttatttttagtagttatagggtattgaggttttattatagtgagaataaaattaagtttttattagggtttttaaggttcggtacgatttggttttgtttgtcgtattggtgttattatggttcgtttttgaaaatatattttagttatttttattttttttaggttttagtttcgggtttttatatttgttgttttttttgttaggttgttttttttttggattttggtttggttgggtttttttggttattatagttttagtttagtgttattatttagaaagggtttttattaattttttcgttatatatatagatatgtatttttagtaatttgtttttagtttttttatagtttttatttaaaattatttatggatttgtttatttgtggattgttttttagttttaattgttaagtaataagcgattagcgattgtgtttttgttgttttttattataggttaagtatttaagagaggggttgtatatagtaggttttaataaatatttattagacgggttaggtacggtggtttatgtttgtaattttagtattttgggaggttaagttgggtggattatttgaggttaggagatcgggattagtttgattaatatggtgaaattttatttttattaaaaatataaaaattaattaggtatggtggcggacgtttgttattttagttatttgggaggttgaggtaggagaatcgtttgaatttgggaggcggaggttgtagtgaggcgagatggcgttattgtattttagtttgggtgacggagtgagatttcgtattaaataataataataaaatatttgttagaagaattaaagtagtttgtttgtgtttaataggaatttaagagtataagatgaatttaattaaaggatatatatagtaggtattttatagttgatatttgttggtggagggagattaggaaagtggggagaggtagtgtttgggtatggggatattttgggtatggggacgttttggatatagggatatattgggtacggggatattttgggtataggacgttttgggaacggggatattttgggtacggggatattttgggtatggggatgttttggatatagggatattttgggtacggggaaattttgggtatggggatgttttggatatagggatatattaggtacggggatattttgggtatggggatgttttggatatagggatatattgggtacggggaaattttgagtatcgggatgttttaggtacggggacgttttttgttatttgaaatttcgtagttttattatattcgtttgttttagtaaatcggtttaaagagtatttttaagtttttatggtaaagttttagagttagtgttttttcgttgatttcgagggtgtgttgtttatttagtgtttaagttagagtttttttatttagaaaaaaaaagaggagggtggttttacggatggaggtatgagggcgtttataggtagagggagttttcgggttgagatttgcgttattttttgttttaattttaaggcgtagtttggagtttaaattagtttttaaacgtgggtcgttggttaagaggaatttttttatttacgatttttttttatatttagtttttattgtttagagtatgttagttttgtttgttttggtttttaggatttttttagggatttttaggttttaagttagggtgggtttgaattaaggtagttttagaatttatgttaatgtttttgttagtgggagattttggggagtatcgtgcgggatgtatggggttaggcgggggtatatagcgagcggttttagaagttttggtcgttcggagtgggggggtgtttagagtaagagacgggttaggaagttggagtgagtaaggaggttttagtttttggtgggagtaggtcgggtaaaaataaattaatttgagggtagtagttagcgagattattataggaggggtggtggggtcggaggggttttaggagtttaggagagggaggtattgttagaggtaaggtcggtagatgagagttagtgttggtaggattaatttgttatagtagttatggtttattttttttttttttttttatatatgtttttggggtttatggaatttattagtttattataaaggatattataaaggatataggggaagagatgtgtagggtaaggtatgggggagggacgtagagtttttatgtgttttttaggcgttttattttttaggagtttttatatgtttatttatttagaagttttcggaattttatttttttgagtgtttacggaggttttattacgaaggtatgattgatttaattattggtcgttgatgatttgtttaatttttagttttttttttttatttggaggttgcggggtggtgttgaattttgtgattttatttggttttttttgggaattattttgaagttgttagttggtttgttaattatgagtatttaaaaagatattattttggagattttaaggattttaggagttgtgtgttaggaaatggagatgaaaattaagtgtatattttataatatgatagttagttttttttaattttagttttattttttgtcgtgttgtcggttttagtttttcgcgttttagggtttttgaatatattgtcggttgtttgtagcgatcgtttttgtttgttgggtttgagtttggtttattttttttatttttttgcgtttagttcgaaggtgttttttcgaggtagtttttttgatttggttttacgaatcgtaggttttgttttgttattggttttttttgttatatttgttattttttgtgttttacgtttattgatgtggttttgtatttgtgtagttttatgagggtaaggattgtgtttggttttgttttttacgggattttagcgttaagtttatagggagtatttaatgttgaatgaatgaatgagtgatcggtaagggaggtttattttgttatgttgggggttaaaggttgttgggcggattatatgggtgaggttgggtggggagggaagtagagatgattttttggaagaaggggtaggaggcggggaggtgggtgtggggtgttgtataaggatggtaagtgtttttaggggtgataagttaatttagagtattaggtagtagaaaaaggttgatatttttacgttttatttttatttagggagaggttaggttttcgggaaagttagtttttcgttgttaggagagttttaagggaagttttattagttgttgagttggttatagtggaaatttatgtggtgggtgggaggggtttgaggtataggggtttgggtggtggttttaggatggagatttgtgtttagattatgaggggtggttttagggatgattatttttaaataggaagtagataaaggtatagatggtagaagcggaggtagagaatgggttgtaggggtttttttagagggagagtcgagtaaggggataggttggaaatatttagtttttatggtttgaagtatagatagttggttttatacgtaggtcgggtagttatattatttagaataaggggtatgttcgtagggtaggttttaggacgtttcgggttggttttgttattagtttagaaagacggtttaggttttttcggtagggagtacgtttagttaggttttgggtaggagttgagattttttggttggtttgagaggggatgatcgagtgtaggtttagttcgggatttttttattttttttcgttatttagcggaattagttgggcgtgagaaaagaagagaagtgaattaagagtttagagtatgaggttggattagtttttatattatatgtaaaaattaatttaatttgtattaaagatttaaatttaagagttaaaattataaaatttttagaagaaaatataggggaaaagttttttgacgttgtatttggtaatgattttttggatatggcgttaaaagtataggtaatagaagaataaatagataaagtggaacgttatagaagtttaaaatatttgtatattagtttgggtgcggtgatttacgtttgtaatttcggtattttgggaggtcgagacgggtggattatttgaggttaggagttcgagattaatttagttaatatagtgaaatttcgtttttattaaaaatataaaaattagttgggtgtggtggcgggtgtttgtaattttaattatttaggaggttgaggtaggaaaatcgttggaattagggaggcggaggttgtagtgagttaagattatgttattgtattttagtttgggtaatagagttagattttattttaaaaaaaaaaaaaaaaattgtatattaaagggtattaataacgtggggagaaggtaatttatggaatggtagtaaattataggttagatatgggattagtatttggatattaatttatagattttttaatatttagtaataataattatttaaattaaatataggtaaaggatttggatagatatttttgtaagaatatgtgtaaatgagtaataaatacgaaaagatgtttaatattattaattattggggaattgtaaattaaaattataaggagagattttttataattatgagttttgggtaggtaggaagacgtttggtggggagttgtcggttttatgttgtttttagaatttttgtaggggttaagttcgatttcgatattttattaggagtatagaaacgagtggaaaaggttaaaggttattttaaagggttagaggggtttagtaaggagtttgggatatggaattatgttgtgtatttagatatacggggataatagggggatgaaaggtggtttttaaaatttatatttattttagagtttatgaatatggtttatttggaaaaagggtttttgtagacgttatgaagttaaggattttgagatgggattattttgggttatttagtgggttttaaattcgagaaagattgttcgtatgagagatagatagggggagatttagggtatagaaggaggtttcgtgataacggaggtagaggtcgagtggtgtggttacgagttaaggaacgttaagggtttcgggagtcgttagaagttgttagaggcgagaagtaggttttttttcggagttttcggaaagaattaggtttgttgatgtcgtgatttcggatttttggtttttagaacggcgagagaagaaatgtttggtgttttgagttatttagtttgtggtatttggtgatggtagttttaggaaattattatagggattagagtttttacggggttgggtaggaagcgggtgtagagcgcgttaggttaggttttttatttcggagatggaaaagtagagttggagaggttgagatcggataggtatcgagcgtttaggggtaagaatttttaggggatggtagaggttatcggggatagtatagcgagggataggagggaggggtgagggttgaggtatcgttttttaggaggtttcggtttttcgtttattgatgatttaggaatttcgtaagaggagttgggttttattttgtgtcgtattgtattagatggattttggtggggatagacgtttagcgatagcgtggttaagttttttttaggatttcgggtttgtatttatgattatgtatagacggttattttttttgtttgtagttttttttcgtggtttgtttttagttttttagtttaatagagttttttagtggaaagttttttttttggagattttttttttgttgaaatataagtttttggaataagataaaattgtttaatttgtaaaagttataaagtcgttttagaataaaaaaaaagtttcgatttttggttggaaggagtggttttttatgttttagcggttagttattattttatgatttatgtcggttttgttgataaattttttagtatttttttaggggaaggttatagtttttagggagggcgggagagtatttaggttttcgtttataaattagatcggagttagatattgtcgagggagggataagagggtaggttttggggtttttaagttttttttggggttggtagattatcgtggatttattagggtaggattatttttttttataaattttttttgggtagttgtagggtagtttgagttggatacgttttatacgttagtttagtggggtatgaggtatttatagttacgtttggaagttagcgggtcggtatttgtcgggtaggtttttgttatataggtatagcgttttttttatggtttttttttaggttagagtatgtttggggattagagtagttttcgtagtggtttgtagtttgataacgcggcgtgagttatgttttgtagagaagaagagttttttagtgagggaagaggcgtttataaaatttaggatacgcgtagaaattcgtaggaggtgggggcgttgtttaggggtcgtgtcgtttttattttttattttgtagatgacggaattgcggtttagagttgttaagtggtttgtttaaggttatttagtagggataggaaggaagttatttttttagggattgtgcgggagtttagtgataattaaagattagcgttaaagtttgtttaggacgagaattttattaagggaaatagtttcgggattgtcgtgtttattcggaaggtagttagtttataattgagtttttaaaaatgtacgtttttttatatgaaaatatattcgaatgggattttgtagaaagtattttttattaaggtatagttcgaggggaggttttcgttttatttttggttgtgttgtttttagttaagggtagtagggattagagtggtttttggggtatagtattggttgtttttaaagagtgttttgtttagtttatgaaaagttcgtgttttgtgagtttgggagggtgttattatttttagttttttagggagtattatttttaaatttacgtttttttgtttagtttttagattttttgttggttatttatttgggtttcggttagattatttataaagtgaaggtcgaattcgaggtttttcgaggtttttgttagttaggcgggtggagtgacgtttttttggggttggtggtttaggaggtaggggatttattgtggtttgtttaggttgtttggtggggtggttatttcgaggacggttttattgtgtaagtttgacgaaggttttttttagcgttttttgttttgcggtttttgttgggcggagagtaggacgttgggttttatatttattcgttttagcgggtttgagttttcgagtttaaatagataagatgtagttttattgttatttaagttttttgtcgttttttttggtttttttttgaggttcgtttgttgtgttcgattgggtgtgtttagcggtataatatatattcgttttattagttttaacgtgataattaagatgtggttttgaggtcgggcgtcgtggtttacgtttgtaattttagtattttgggaggttgaggcgggcggattacgagattaggagatcgagattattttggttgatacggtgaaattttatttttattaaaaatataaaaaaatatggcgggcgtttatagttttagttgtttgggaggttgaggtaggagaatggtatgaattagggaggcggagtttgtagtgagttgagatcgcgttattgtattttagtttgggtaatagagttagatttcgttttaaagaaaaaaaaaaaaaaagatgtggttttgggagtagtggtggaggggattatacgttttagagaggagttatcgagatgggttttttttttttaggttttttagggattttttaatatatatatagtggtaattaatagattagggtttaaggtacgtaggggttgatatttttagcgatttttcgttttatggttcgtaggttattttagaatatttaaagtttggagtttggtttagttattttatgttttttagcgttgggtttagagggcggtatgagcggtagaaattgttattattgttaattatcgatgacggcgttggttacgtgagatggtagttacggtatcgtatgtgagtgaagggattaaggaggttgggtttgggagggagggtttggaaagttggggtgaattaaaggtaggggagttttttttttttttatttgtttgtttacgttttgatgggtttgtgtttgcggtaagggggttgttagcgtgaatggatatacgtatatatatgtatatatacgtgtatatatacgttaggtttttttgagcgtcgggagtttttttttttataattaattgttaggaaggtatagaaatgttattttaggtaggagatcgaggtagttttgaagatagattttggttggaagtaaaaaataaattatatagtggataaattaattattagttaggtttaagcgtcgtcgttttagattcgagttaggggggtaggttttttatatttttttaaggtttcggcgttaatagttttagtattgatagtggttatgatatgtaagaatggtatattggaaaatgaaagggaagtagttaggagagaggagagtcgagtttaaataaaagttagatttaggagagtttagtttttgagacggagtttattttacgagtttggaatcgttaaaaagaaaagaaatatttttgtgaaaaatgagtaaaagcgttttttgtatgtttatttttttaggtataaataaagtttcgagtttagggtagtggggggcggtcgatggggagggggttgtttgcgtatttgagattcggtttttttttatttttacggatatatttagtagcggcgggagtttcggcgtttcgtttagaggcggtttttttttttttattttcgtcgtttttttttttttagttttttttttttttttttttttttttaaaaatattttttgtttggtttaatttttttaatttgttgtaattacgaatgtattcgaattattatatttttatgtgttgattatatgtttgtgttttaaattgaagtagtattgtttttttaaaacgggaggaaaaagggagtaaaggagagaaatttaaaaataggaggtaggagagagggttcgaagtgggtttcgaggagttcggtagattatcgggtttgtttgcgagagttttagagtttcggtcgttcggtttggtcggtggttgtagaggtttcgagtgcggttttcggtagttttttttttttattttttttagttttcgtcgtttcgaggtttgttgtttttttttaatatttatttggagatgtttaatttagatttttggaaattaatttatagagttaaatttttgacgatttttaaagttttttattttttttgtttcgcgatgttacgatttttttgggtttaagggtttaaaaagtttagtttttgcgtgtttgtttcgtttttttttgttttgggttggttttagtttttttttattttgtattttaacgtggttgggtaggaggaacggtcgtgttttaggttagcgtgttgagaaaaggtttcggagtatttgtttaggaggaattttgagaagttattttttttcgttttattagtttgtagtgatagaggtagttgtcgttttcgtttaggtagagagggcgaacgggacggggattttttggaagatttttattatatacgtatgagttagtgagtttttagtcgttttttgggagggagcgagttttttttttcgggaattcggggttttattgggggattagtgttgttttttattgtttattcggggtttttagaggttgtttatttatttggggggtttttattagtatatggttagggtttatgttgaggttaagggtttagtagagtaggtgggggtttataatgtgggtttttggggtgggaattaggggtattttttttgtttttaagttttattttaagggtttatttaaattcgagatacggaggttggttttgttggtttaagtttgtttaaagagaatgtgtgtttgtgttaaggttgagaatttaggtaatttttttgaaaattttagattgttagtttttgttgagaaagggaggacgcgtggtcgtattacggaagtttttttgtttggtcgtatagggttggtataagatagttttgttttttagataaaatattttttagtttgtgttgttttttaaggtttttaataaatttataatatttgtatttttttatttcgatatatttcgtaggtttttgagtttataatttttgttttatagagttaggtgagttatttgtgattaggtgaggtttatgtatagttttcggttagatgatagagttaaaggttttgaagtgttattttaggttatagtttcgttcgttttttgtttgggataggattttaaatgtaatttttttggtagaaaggatatttttttggggggtggggaggattatttttagttttttgggagatattaagtaattatttttttttaaagagtttggaggatagttttataggtagttagatagtgagggaggtggggatagtattttagtcgaggtgggaggttggggaggaagggagggattatagttacgagagaaggttgaataatggttttagggatagtatgttttaatttttagatttgtaaatgggattttgtttggaataagagtttttgtatttgtgatttagttgtagattttgttgtggcgagagtattttggatggtttaggtggtttttaaaggtagtttcggtgtttatataagacgggggtagagggagatttgatatagatagggatggttaagtggagatggggttcggagagatttgtagatgttggtgttgaaggtaagggttatgtagttataagttaagggatatttatagttattagaggtttaaaggggtaggcgatgaaggtagtggtttttaatttttttggtatttgggatcggttttagggaagataatttttttatagattagggagtggggagatggttttgagatgatttaagtgtattatatttattattttattttattttattttattgagatagagtttcgttttgttatttaggttggagtatagtggtattattttagtttattgtaattttcgttatttgggtttaagtaatttttttgttttagttttttaagaagttgggattatagacgtttgttatcgtgttcggttaatttttgtatttttagtagaaacggggttttattatattggttaggttgattttgaatttttgatttcgtgattcgttagttttggttttttaaagtgttgggattataggtataagttattgtgtttggtttttattttttattttttgagatagagttttattttgggattataggtgtgagttattgtattcggttataagtacgttgtattgattgtgtattttatttttattattattataatatataatgagataattatataatttattataatgtagaattagttggagttttgagtttatttttttgtaattagacggttttatttggtggtgatgggagacggtgatagattattaggtattagatttttataagaagtacgtaatttagattttttatatgtgtcgtttataatacggtttatttttttataagaatttaatgttatggttgattagataggaggtagagtttgggtagtaatgcgagtaatggggagtgattgtaaatatagatgaagtttcgttcgtttgttagttatttattttttgttgtgtaggttagtttttaataggatatacggggttgggaatttttgttttagagtttttagagggttatgtttagtggatattttgattttagtttggtgattttgatttcggatgtgtggtttgtagagttgtgagaggatggttgggcgttgttgtgatttagttagtttgtggttattcgttatagtagttgtaggaaattgatgtagcgttatagacggagttagggtttagtttattggagttgttttttgttattttatttttttttaaaatattgtgttaagttaattattaataattattgatttcgatgggtaggaatcgtagaggttttttggtttgtttttttaattttttttttaattttgaaataatattttttgttggtttttttgattataaatgtaatatttttttttgtattgagtttagaaataagagaaaaagtaaaaagtagaaattttagttgggtaaggtggtacgtgtttgtaattttagtattttgggaggttgcggcggaaggattgtttgaagttaggagttcgaggttgttgtgagttataattgtattattgtattttggttgggtaaaaagagtgagattttgttttaaattaaaaaaaaaaaaaaagaagaggaagaaaatttattaattttattcgagattttttatacgaatttttgttgtggggtagggaagtttaggaaggttttacgaggttttgatttagtttggttggcggtgggaatttgggaatagtttcgagtgaggggtcgggttatgattgagtttatttatttagttattttttgtacgttgtgtatattatgggtttgacggttagggttggagtatttgttgagtatagttttgatttttagttttatttagtatggtttggtttgaggtttatttttttttcgtgtttgaaaatttaaatattttggtttaggcgggggattatttgaaatggaaaatttggtagtatcgattggttttgaagaggtaggagttagttatgagtcggttgggaggcgagtgtagaggtggtgaggtaaggttagtagagggtgggggaggcgagggttaattttttatcgcgtatggtgtaagtattaagggggtattttattaggttagtgtagatttaggtttttgcggtggatttttcgcggtttttttttttagaggaatattgaagaggtttttgtggttttgttttagatttagaggtatatttgtatattaaacgtattgagtaattttatagtgagggagtcgggtttggtttaatttatttttttttaaattggattaaaggttgttgttttaggaaggtagggtttttaggtttacggttttgggaaattttggttgtgttagtttatgagtttagtttttagttattttagtttgtttatattttggagtgggtattgttatttaaaagttttttttagatagtttttagggcggtatttttgttttttattttttatagatttttggttatttttttgcgatattagtattattggtttatagttttttttaattgtaaagtggggtttagcggtataggttgggtttggtagggcgggaaggaagagcgaaggttattttgtttttaatagtattggtcgggttttggaaaggtcggaatttatagataggaaggaagtgttatatttatttaatttgttttgcgttagttagggggtattttgtagaaagaagttaggtggtcgtggtcgggtgtagtggtttatgtttgtaattttagtattttgggaggtcgaggtaggtggattataaggttaggggttttagattagtttgattaatatggtgaaatttcgtttttattaaaaatataaaaattagttgggtatggtggcgtatgtttgtaattttagttatttagaaggttgaggtaggagaattgtttgaatttgggaggtggaggttgtagtgagtttagattacgttattgtattttagtttgggcgatagcgcgagattttattttaaaaaaaaaaaaaagaagttaggtggttattttttagtttttggtttggtttaggaattgttttttttttaagatgttattaaatgttttttttattaggaagttttttttggttgttttttttatttttgtttttgttttagaatacggttcggtttttacggataattttgatattagagtttaatagagatttttttttttatggaaatttatattttaaattgaatatgtgtgtaggataagtttttgtttttatgtgaaataaaagtgaaaggtgcggattatttgtttttttttatttttttttataataatttgggttttataggggtttagtaggagttaggtttagtttagtcgttttaggtgtattattttgggtattagcgtttttgtttttttttacgaagtatagttttattttttggtatttagtggggaggggatatatattaggtattttttagggtggattgtgttttttatattaggttaggaggttttggggttggtttagttatttagaaaagggagtaggcggtttaggtgatattgatgtgggtagtaggggttttcgggaaagggttttcgtaggatcggttttattttgttttaggagtatatattggggaagggtgttgcgcggaggtggagagaacgtatttttggttgaaagtatgttttttgatgttttgggttcggatttgttgttattttttatgtttttttatttaatatacgttttagtaaattttttatgttgatgagcgttaagttatagaggacgtataatttttcgttttaaaaagtgattttttttgttgggtgtggtggtttatatttgtaattttaatattttgggaggttaaagtgggaggattatttgaggttaagagtttaagattagtttgggtaatatagagaaattttatttttataaaaaaaaaaaaaaaaaaaaaaagtttaggtatagtggtttatgtttgtaattttagttatttgggaggttgaggtaggagaattatttgaatttgggaggtagagattgtagtgagttaagattatgttattgtattttagtttgggtaatagagtaagattttattttaaaaaaaaaaaaaatttttttttttgaaatagggttttattttttttgtttaggttggaggatagtgacgtgattataatttattgtagttttagtttttcgggtagttggaattatagggttgtattattacgtttagttaattttttgtatttttagttaagacggggtttcgttatgttgtttaggttggtttggagtatttgagtttaagtgatttttttatttcggttttaaaagtattgggattataggtatgggttattatgtttagtttgaaaatattttttttaagaattagttagttatggtggcgtataattgtagttttagttatttaggaggttaaggtaggaggattttttgagtttggtaggttgaggttgtagtgagttataattgtgttattgtattttagtttgggggatagagaaagattttgtttagaaagaaaaaagaaaaaaaaaagatttttttatttattttttgtttatttttagatttaattattgaagtttgtttttttgaattaaaaatgaaggagtttcgttttggatttttttttgttgattttgttattgtatttgttagtagagttagttaagattttttaggttggttttagtttggttcgtttatagttttttaagtaagacggatttttaggttgaggttagttgtatttttttttggaatttttttttattttttattgtgttttagattttggttgtttttaaataaatataatttagttatttttgtttttggggtcgttgtagggtttattggtgtaaatcgtttgggtaggtttgttgttttaggagtttttttaggttagcgtggaaggaaattaagataacggggagaagtagttcggttgggtttaattttatttttatatgttcgtgtttagttaattatttgggttgtagtttgataggagttggagttggcgttttatttttagagggggttttcgattgtttttgtagagcgagggaggtttgggggtgtagaggttaagggtttttgtagagtttgttttaggttttttgagtttaagtttttttgtagttaacggaagattttttcgagagcgggtgttttttattttgtttgtttagtaggtgtttagtaatcgtttattggataaataatgaatttgtggatttaacgtgaagatgatttaaattagcgtttttttatagaatttttcgtaatgatgttaatgttttgtatttgtcgtagttaatatggtagttatatgtggtagtgaacgtttgtaatgtggaagggttattaaggtaaagagtttcgtatttatgttataatttaaatttaaatagttataaatgtttagcgtgtgtttcgttatatagattttttttgttattttttttttttttttagagatattgtattcgttattaattttttattcgggaggtaaacggagaaatgttattttttagttaacgtaaaagaaggttaatatttgtattttaagttagttttttgggtaatttttttaagtattttttattaaggttagtttagtaatattttttgattgtttgttacgtattaggaaagtatttcgtcgtggttttggttcgaggttatggaggatatagaaataattaaggttaagttgatagaaggggtgtgataagatggtttaaagttattgagttagttaggaggtttaggagtatggaagttttgttttttagaggataagtggtaatttatttagggggggttcgagtatttagagttaggagcgtagaagtagggggttttaggttggaaagcggtattagggttaggttgggcggtagtacgaatttattttcgaggttttgggggcggaaattaagggttttatgagtaagaagattcggtttaggtttaatggaaatgatcgggtggagggattttattattcggtttttagtatatagggagggaagtggtaatcgttttttaaatgttggtcgtggaggggaaggagttatagtagggtaggggtggggaggatggtatttgttggtttaaggagggatgatggaggtttaattaagatatgatcgtgatcggggtagtttgtttaagggttagtatgtagagggcgagttgatgagattttggtagtttgttgagatttgggggtgttggggaggtagaggttaaggttaattttgagattttttgtttgtaaatttgggtgggtggtaaggttgatattagagaaatagaggaagagtgggtagttatgggtgagagaggaagtaatgaattaggggtgtttgtaagagtttaggggtaaggttttcgggtagttaagatgttggtggttttttttacgattagttttttttacgtggtatatttttgtttgtatggttgggtatggggtatttgttcgttcgatatattttgagtagttattttgtgtattgaggtaacgtggtacggtgttttggggaaatagcgaggaggtattgtataggttttatttttttggtattttttgttttttggggatggtggtagttaaataagtgatagttaattgttaggagagtttggttttgatttattaggtggagttaggtatttttgtcggaagaggtatgggaattagtataggatgaagggaggtagcgagtattagtttaggttttgtttttatagggttttttttttatatttatttgtgtaggcgttttttgtgagggtagagatatttgtagtgtttgagggagattttttgcgggcggggtcgtttatttatagcggttaggtgggaggtgtattagtgttttgtggttgttataatggattatagttgtggggtttgaaaaaatggaagcgggtttttttttatgttggaggttagaggtttaaaattaaggtgttagtaaggttatattttttagggaggttttggggtggggtggggggggggtttttttttgtttttttttagacgttttttggtttggggttgcgttattttattatttgtttttgtttttacgtggtttttttcggtgtgtttgtggtttttttgttttttttaaggatattagttgttggatttagggtttattttaatttagaatgattttattttaagatttttaattatttatatttgtaaagattttatttttaatttttaggttatattttgaggtttttggtggatatgagtttgtgggggatacggtttaatttaggatagaagggatgatgggggtattggggaaaaggttatatattttagaggtattggaagatggaagagtaggatttagcgatacgggatgttaggtagaggagttggttttaaggattttagtcggggtttgagggttagagggagggaagtttaggtattattgagatgaaatgtttcgtgtatcgtgggaaatagggtaaaagttcgttggacgtttagttagagaggcggttgtttgaggtatagaaaatgagcgaatatgggagagtttattagaaggttattcgggagggcgtggtggtaatatttagaagggttgagaagcgtatttttatagtttagttaaatttatttggggaaatatacgttttcggtagtattagtaatagagaagattttcggcgatgttattagtgggttacgggacgggtaaattttgtttttttatatagaggaatattcgttagttgttaaaataagtgaattaaggtttcgtggatttatacggataagtttttacgtcgttacgttgtgggtataggtagggtagttattgattttagtgaggtattaaggatgtgatgttgatgacggtatttaagaggagatagatttaggttgtttagttatacgatgttgatgatcgtatgtaagaggagattaggtcggatgcggtggtttatatttataattttagtattttgggaggttaaggtaggtggattatttgaggttaggggtatgagattagtttgattaatatggtgaaattttgtgtttattaaaaatataaaaaaaattagttagatatggtggcgggtgtttgtaattttggttattgaggaggttgaggtagaagaatcgtttgaatttaggaggtagaggttgtagtgagtcgagatggtgttattgtattttagtttgggcgatagagcgagattttattttaaaaaaaaaaaaaaggagatttaggttttttagatatattattgtttagtatagatgtgtttgttcggggttagattttaatttagaggggcgggtatcgtagtaggagtggggttaggatggagaaggttatttagggttgcggttatatttgtaatgttttattttttaagcgggatggtgagtatataggtgttttattattttattttttatatttttgttttgtagttttaagaattttattttttttttaaaaggaaagaaagtgtgtgagttgattaaagcgttgattatggtgttatttaagtttttgttagaaatgttatttttggtttagttttaaatataatttcgagaagagttttcgtttttttggggagggtaagagttttagatataggagattggttagatgtggatttatagagaagttgggttgggaggatgggatggtagatagtcgtttggggagtgttaaatggggaggtcggagatgttggggcgtttaggaatgaatttttgtttggattagggttttagtaaaagggaggtagggagaaagaaagaagttaagaagatgaggaaagggtgtttcgggttagagtttatagaggtttatagagggaggatttcgtgtgttagtaggtagttttacgtaaatttagattattagtttgtagttttgggatttagtaaattatgttttaggtttttaagttgagttgtgatcgtggttgttaagtgttgatagtatagaattagttagtttgagtagagggaagtaatcgtcgggggaggttgtgtttatgtagtttagggtgttaggtttttaagatgtaatttttataagaattgggggattttttttatttattttattagaagttggttaatgagagggaaggagatggagaggtagattagatgcggagtcggagaaaagttttttagaaatatagtagcggttgggttgtttagtggttagtgtttaatatgattgcgatgggcggagttttttttaattatagcgttgaattatgtagttgtttaggggtttttagttagagtattatttttttttttttatatatagttttattttgtattgtaaggggttttatatgtatttaatgtggatacggtattttttttatttttattttttgtaaaaagttattttttttattgtttaggtttggtggtgtatagtttacgggtattgtatttatttttggaaggtagatttaggaggcgtttgtgttgtttttatagaagtaagtttaggattagaagtaggttttgggtttagaattttgaggttttaggtgttagtgtggtttggaattgtttagttttatagttattagttatacgtagatataagtggaaatttatttaaaataaataaataattttatgtaagtaaatgagtgaataaagtaaacgtaaatatttatattttgagtgtgtaatagatttaggcggttaagcggttattatataggatggcggagtgtagatgtatagaatagatttattattatagaaggttttattagacggagttggtttagagtatggaggtggcggttttagatgggtatatgtttttgttttcgtaggcgttttgttttggtaggacggttgttttattttgttttgaaggtagttttggtttataggcgttttatttgtgtggatttgatttcgggttcgtgttttttggtaattttgttttttttagaatggttaatttatgaaggtatagtttttgtttgtttgttattatgatggtagttaggggtttggtatttagttggtttttagtatatatgtataggtgattacgttatttttgttttttttagagtttttcgttttttaggggaggtaagtttatttattgttgtgatttattattttttttaaatagaaaagttattagatgggtatttgttttagtttggtcgttggaagtgatagttaagaataacgtaggtttttagaaatagaggtattagtatggttatattggggttaggtaggggagattagggatatttagtggggagaagatgacgcgtagatttagttttggggggtaagggttggaggtagagttttgatttttttgttttatttttttgtttaggttgtatttagtgttggtagagtttttttaagtttataagttgtaattcgtgttttggacggttagttttagagttttgatgggtgtatttgttttttttttttattggttagtgtggaaaatttttaaatatatggaaaaagtataaggagtagtatagtgattattgttagaggtttatttatttttttttagataatatcggacgtatttgttttattttggagtattttttattttgtaaggttgtagggagtttatagatattgaattaatatcgagaggtttacggttaaagttatttgtttatggtatatttgtttttttagtattttaaattaaattatttagttttatttattttttgtttttttttttgtttcgtatatacgggtttgttttttgagtttgggggtggttgtttttgtttttataaggattatttttagtagggtagcgtcgataggtttggaagttatttgagtttaaagtcgttaaagattgcgtttttttgggaaatgggtaagtggttttatttatttagggaagttaggtggggaggtaggttttagattagaatgaagggattttagtataaatatatttatgagttgggtggggttagagcggagcgagttatttatttgggttattggagttattaagttttcggagtcggttattggaggttcgcgtgttttttaaagatagagataaagggtaaaggttatataaggttattggcgtttttttttcgggtggatgattaatattaggaatgttttcgtttttgtttttgttgtgagttttagagttagaaacggggtttatttggggatagaggttttatttttttaggtaattttggacgttggagggatgatagttattgttgtttggttgttggaggggttttgggttaaatttttatatatatttttttttaagttttattatttttgttttgtagataaggaatttgagtttttatagagtgttatttttttgtggttatatagtgaatgagagttgtatataggtgagtttacgtttattagattttaagttgggttgtatttaagcgtgtttttgttggacggagtttttttttttttttatgtttattcgttttatgaattagggtttttttatattagggtttataatttacgggtagttttgatttagttttttttatttttagggttgggtgtagtcgggttggatttggggatggagtgggataggttatttttattttttgttttaggagggaataaaaatagaattttagattaatgtagtttttcgcggtatgcgttttttttgtttatatataggttttggtttggggttgtttgttggagaggtttatggtaggtaagttttaattcgaggagatttgttgaggtgttaagttaagtaaattcgaaaggttgttaggaggagcggttttgggagtataggcggttattttattgttgtagagtacggtattttggggatgttttttgggtaatgttatatagttattttttagagagttttagggatatataattagtttagttttattaatagtgagataagggattaggtagatttagatatttttttgtatttgattattatgttggttgttggttaaagatgttagtttttttttggaattttttagaaaggtttttgtagtatttatttatttatttatttatttatttattttatttatttatttatttatttatttatttatggattttatttattttattatttttttatatatttatttatttatttatttaatttatttatttagttttttatttatttatttatttattaatttatttatttgtttatttaatttatttatttattaatttatttatttattatttatttatttatttatttatttatttatttttttatttatttatttatttttttttttatttattttataattttatttttaaattgtgattagatggaaatgggtgtagttagtttgtttttaaaggtttagagcggaggtagagtgaattgtttatttggttttcgtgtttagtagtttaggtttgtatatatgttttataattataggatattagatttagtaattggtagtagaatgagtatagtgtatttttcgcggaattagtattgatagggtatttatttttattaagtttgagtttttttggtgttggagggaatttttagatgggttttaattttagttgaatttattttttagggaaagtaatatcgtgagaaatgcgtgtgatataaggttttaaagagggtgtgggtcgtgatttttggagtaattagggaggttttatggaggagatgaggataaagttgagttttgaaggagggatcggaggacgttgagtagggatatttatttttgtttgcgagggtttgacggtaggttgtgagttgtattttagtttcgatttatttaatttataattttagtaggtaggtgttttcgttttattttatagaggaggaagcgaggtttagggttgggtaaattgtttaaggtcgtatagttgcggaatttatttttagtatttttagtttgttttagttatgttcgtgattttatttagtattttttttttggtgtttatttattttgtttattgttaagtaataaaaattttattaggaaaatttaggggtttttggttagtttttttagatagaaaggtagatttcggcgtagatttttaggaagtaaggatggaagggttagtatttgttttttagaaatgatagtttttttaagattaggagagatggtttagagtgtagtttcggtgggttgtttaggattaggaggggagaggagcggggaggaggatgaattttatttttaaggttgttgagtggtatatagtgagtttggattttttagttttagttgagtttatttttacgatggttatgagtattttttttatatattcgattggaagtcgtattgtatataacgtatacggggttattattttttgttttatatatttttacgtatatattattagtgtattattgggatattttgttgttcggggttgagagtgaattagaattttgtttataaatttagtatattttattgtggaaataatggggggtaaggaggggtcgtttagtaaagaataggatatacgtttttgaggatggagttatttttggttgagatatttttgtaggggatgtcggcgataaaggttgttttatttttttttttgggttagatggatattatttttgttttttgttttttagtattaggtaaaaggaaaatagaagaggttttatttaggttaaatattttagggttttttattcgtaggaaatatgttggtttattttttttaaatttagtatgggggtggagaaacggtggggaaaatagtatttgttttagattttttgggtggagtttttgttttatttatattgtttatttttttgattttttaaaatgggtatttggtgtttggtagtttttggtatagagaagacgtaaagtaaatcgtttataagaagggggcgagcgtagtttgagtattttttgtttttgaataaattgttaggtttagcgtagtcgttgtcgttattgttgtttttaggaagggatttttggttacgagcggttttagtttagttttttggatttaattatttaggtttgtgtttgagtttagtaaagaggtagttagaaaagtttttaagatatttaacgatttcgtggttttagttgagaagtgagttatttttatgtgattttaaaataaaatatatttagaaggagagaagataattgaaatttagttgtttggagttattttagatgaaagtatttgagtttttgggaggtaaaggaggtaggaaagtttggagttagatgattagaatttgaacgtagatttcgttaggtttttgttgtgggttttgggagatgatttttattttttgagttttagtttttttggggatagagatggtgtttatttataggttgtttcgagttaatgaggttatatggcgtaagtattagtatagtgtttggtataaaattaaaatttaataagtgatattattattattattattattattattatttttgagatggagttttgttttgttatttaggttggattgtagtggtacgattttagtttatcgtaattttcgttttttaagtagttgagattataggtatttgttattacgtttcggttaatttttgtatattcggtagagatagggttttattacgttggttaggttggtttcgaattgattttaggtgatttgtttgttttagttttttaaagtgttcggattataggcgttagttatcgttatttggttgtgatattattataatattaatattataatagttggttaggtatggtgatttacgtttgtaattttagtaatttgggaggttgacgtgggttagttattcgaggttagttcgagattagtttgattaatatagggaaattttatttttattaaaaatataaaaattagtcgggcgtggtggtattcgtttgtaattttagttattcgggaggttaaggtaggagaatcgtttgaatttaggagacggaggttgtagtgagtcgagattatattattgtattttagtttgggcgatagagtaagattttgttttaaaaaataataataataaataaataaaatatattttgacgagatatggtaaaagatagtagaaggtaggagttcggggatttattatgggtcggcgttttaagtagaaagaaatgtagtgtttataagttagagagtagatgtcgaagataggagacgagcggggttttttggttttggagaggaaagggtgagtttaggtagaaagagtaaatttagggcgttttgtgtagtgttttttttgtggaattagtttagggtattagtagtatagtttttttttagtagtggagattaggttaattgtttagtgttttttttgtttttttgttttaattttattaagtatagtttttttttgggtatagtagttttgtaggggtggatattgatttatgtatttaggagtttagaggtttttttttttttatttatttatttagagatggagtttttttttgtcgtttaggttggagtgtagtggtattaatttggtttattgtaatttttattttttaggtttaagtgatttttttgttttaattttttgcgtagttgggattataagtatgtattattacgttcggttaatttttgtatttttagtagagatggggttttattatgttggttaggttggtttcgaatttttgattttgtgatttttttattttggttttttaaagtgttgggattatagacgtgagttattacgttcggttaggggttttttttaatggattttttttaatgtatataatttggggaatttagatataagaaagatatagagtatgaaggttttttattggtttgtttatttttagaggtggggttttaggtggtttaggttggttttaaatttttggttttaagtaatttttttgttttggttttacgttgggattataggtataagttattacgtttagttatttttttttttatttgggttgttatgttagaatttggtaagttataagatggaaatgtttaaataggtatttagaatttgagtagatattatttgatgtattattgttgttattttaatgattgaaatgtatttattatattcgtttttttaaaggttattttagatttttatagattttatttgtgatgtaagatagttattttaaatttttttgtgggttcgaatagattagatttttgaatttttgggtagagtagggatggggttgttttagaggagggtgatatcgttatatttttgttttgtttttgtgttgataatgaatgaggtttggatagttttttttttattaaaagttatatttttttaaaaaggagttttttaggatgaggcgttatgataatttaattgtgtataaatatttatttttaataatgatagaagttatttatagaaaagaatttatttttggtcgggtacggtggtttaggtttgtaattttagtattttgagaggttaaggtaggtaaattatttgaggttcggagttcgagattagtttgattaatatggtgaaatttcgtttttaatgaaaatataaaattagtttgtatgtttgtaattttagttatttaggaagttgaggtagaagaagtatttgagttcgagaggcggaggttgtagtgagtcgagatcgtgttattgtattttagtttgggtgatagagcgaaatttttttttaaaatatatatatatatatatatatatatatatatatatatatatataaatttatttttatttttttttttgaaatttttgagagaggttaggtgtagtggtttatatttgtaattttagtagtttgggaggttgaggtgggaggatggtttgaggttaggagttggagattagtttgggtaatatagtaagattttatttttattaaaaaataataaaagtttaaaaagtttttgagatagtttttggggaaaggtgggttatggagatttttattttggttattcgtgtttttttcgtttgtttttttgtggtttttttttattttgagtttggggtgggggcggtttgagtttaggatgggggtggtttgagtttggggtgggagcggtttgagtttgggatagggcggtttgagttggggtgggggcgttttaagtttgggttgcgggtattttgagtttggggtggggatgttttgagtttggggtgggggtgttttgagtttgggttgagggtggtttgagtttgtgttgggggtggtttgagttgggatgggggcggtttgagttgggatgggggcggtttgagtttggggtgggggcgttttgagtttgggatgggggtattttgagtttgggatgggggcgttttgagttgggatgggggcgttttgagtttgggatgggggcggtttgagttgggatgggggcggtttgagtttggggtgggggcggtttgagtttggggtgggggcgtttaggatgtataggttttattttttttttttgaggtttagtttgtttataggagttgtgaagggttggattaaagttaaaggtttaaattttagatttatttttagatttagtggataattaaaatatttaagtttatttttaaaggaagttgagataaggagataatggttattttttttttttttttttttttgtttttggtttttgttatttggagttgtgttttgaagaggtatattgggtattaggtttttttggttttgtttttattttttgtttagatatagaataatttttttttatttttaaggttgatacgtggggttgtggattaaagttaatttatttatttatgaggggagtaatttttttgttttaggaatttgtttttataggagaataaatattgtagaaggtattgtttttagtggtggtgtacgtttgtaattttagttatttaggaggttgaggtagaagaattgttagaatttaggaggtggaggttgtagtgagttaatattatgttattgtattttaatttgggtgaaaagattaagattttgttttaaaataaaaaaagaatagtattttgtgttaaggttaggggttttagttattttttttgtgaagcggaaggggtattattagtttttgtgagaaggaaatagtttatttaattataaaatgttaattaaaggaggtagtatattggttttggtgcggtgtcgttggtttttgtttggggtaggaggagggttgggggagagttaaaagttaaagaaggtttatggaggtcgttttttttttggtgattagttttttttttgacggtaagttgttaatagtatttggtttttaggttggggaaggtgagattagtttatatttgtttagggttttgttttgtttgtatgggtagtaggcgtttattttgttagatggttttgtttattatagggtattagtgttagttaaggatttatagagtttttttgtaaaggtttattagtgggtattgggattttgggttttatttatatagggtttttatataaaatataggatgtttagttaaatttggattttagataaataattaataattttttgaagagataaggattttgttgttttatttaagttggagtttagtggtatgattatggtttattgtaattttgaatttttggatttaagtaattttttaattgtagttttttaaagtattgggattgtaggtatgagttattaaggttagtaaataatgaattatttttaggtataagtatattttaagtttgttgtgggatatgtttatattaaaaattaatttttgtttatttgaaatttaaattgaatttattgtcgggggagataatggagtgatggattgatagaggagtatagagatagtttttttaaatttttagttgattaaagtttggtttttagtttttttgggtttttagagatgtattaagggtggaagcgattaggagggagataaaaatattgaagtttgagtgttagtattgagtcgtgtggttttggataggattgttttttttttgagttttagttttatatgttataattggttaataatagttataaagtattcgaagttaatggttgggagtttgttttaggaggtaggtattattaggatgtagagagagtgaggagtttttaaagttagtttaggttaggtatagtagtttatgtttgtaattttagtattttgagaggttgaggcgagagaattatttgagtttagaagtttaaggttgtagtgagttgtaattgtatcgttgtattttaggttgaatgatagagtttttgtttttaaaataaaataaaataaaataaaataaaataataaagttagtttgtgtattggattgtatgttgttttaaagtatttaaagtgagagaggttaggaagtaatgagatgtagaaaggtagggggaggaggtttagaggtattagagaagatagttgatttttatttttatatatttttggggtattttgagttttatttatatatttaggtgagaatttttgtatttgtgaaagtaatttgaggtcgagagaattaataggaaatcgttttattttttatgtagggtttttttataaataaggttgagtcgtagtttattattgtagttgagttttttgtagtagttgcggtggggaaggttttttaggaggtttgagtaatttagaaatatttatagtatattttttagtttttttagaggtttttgttgagatgaaagtgttttggttcgtggttaaagagtttagtatattgggtagttatagtttttattatattgatttggttattaggtttttatgaatttagtgaggggagatgggttttttagggaagtttgttgatttttttatattgttgtaaatgtaaagtttggtgattttattatttttagtaattgtgatgtagtaataataagaatagttatgtttatcgtttattgaaggtatatgatgagttagatattgtgttggtatatgtgatttttggaggtaatatatttttttttaaggaggaaatgattgagttttggagggagggttttttatttggttttaggtttttttttgatttgcgttttttttttttttttcgtttgttttattgtagtttttttggtttttttgttgtttttggaatgtattaagtttgtttttagtttagtttttgtattgttggtttttttttgtttttttaattttaatttagttgttattatttttgtgattttttattatttattttaaagtagttattagttattttttatgtaattattttattttaatttttattatagtttttagttttattttgatagtttttagaattgatgaatttattgattttgtttttttttattgtatgtaaattttaagaaataagagtttttgtttgtttattgttgtgttttagtgtttgttatagtatttggtatgtagtaggtgtttaatgaatatatttttaaaagaatgaacgattggaaggagtttgaaagaacgatggtttgtgttaatagtttatttttaatttttttagacgggatggagattattattatgtaattacgatttttttgagtttgtgtggtggttgacggtaggtgttagtttggttggattaagggatggttggtaacgtatcgtttttgggtgtgtttgtgagggtgtttttggaggagatgggtatgtgagttggtgggttgagtggtaaagatttttttttaatatggatgatattattttattgttagataataaaaaggtagagaaaaggtgaatttttttttttttttggaggtgggatgttttttttttttgtttttggatttagaatttttagttttttagtagttttttaggtttttaaatttttggttttaaattaagagttatattaatagttttttagttttgaggtttgtagatttggattgagttacgatattggtttttttgggtttttagtttgcggacggttttttgtggtatattttggtttttataatggtatgagttaatttttttaataaatttttttttatttatttattatttatttttttaattgtttatttgtttatttatttatttatttattatttattttttatttatttatttattatttatttaattaatgtatttatgtttgtttgtttatcggttatttatatttatttattaattatttatttatttattatttatttgttatttatttagttatttatttatttatttatttattttttttttttttttgagatggagttttattttgtcgtttaggttggagtgtagtggcgtgattttagtttattgtaatttttattttttaggtttaagtgattttcgtgttttagtttttcgagtggttgggattatagatatgtattattacgtttagttaatttttttatttttagtagagatggggttttattttgttagttaggttggttttaaatttttggttttaagtgatttatcggttttagtttattaatgtgttggttattataggtaagagttattgaatttaatttattatttgtttgtttgtttgtttgtttgtttgtgtttatttgtttgtttggttatttattatttatttatttatttgtttgtttgtttgtttgtttgtttgtgtttgtttgtttttatttttttgtttgtttgtttatttagttatttgtttgtttgtttgtttgtgtttgtttgtttttttttttttttgttcgtttgtttgtttatttagttatttatttatttatttattttttattggttgtttttttggagagttttggttgatgtagacggtgttttggtaagtttaggttgttatttagattattgtggagggagtgatttaaataatagatatgtattttttagtttgagaggtttaaagtttcggattaaggtgtcgttagggttagttttcggcgaggtttttttttttggtttgtatttatttttttgttgtgtttttcgttattttttttttgtttataagtgaggggggaggagagatttttggtgtttttttttttttttataaggatattaattttattagattagggttttgttttatgattttatttaattttaattatttttttaaaagttttatttttaattatagttgtattgggagttagggttttaacgtaggaatttaaggggaagggtatagtttggtttataataaatgggaaattatgtttatgattaaattttttagaagatatggtttattagcgtcgttaatgattgtaagtaaaggttagagaggaaaggggttttcgtggggtggggggcggtgggggtagttggtgtcgggaataaggtttttttttttgtttaatagtagggaagtgaggtcggttgtagatgttatttggggtgggaagagaggggagtttttgtttgtatattttgtgtgggttttggtttgattttttttcgtgttttttattttttgtgtttttttttgtgtgggagaaacgtcgatttttgttggtttaggtgtttaggtttttaggtttgttggttttgggttgggtttaattaacgagaggtttgggaggaatttgggaggtggaagtaagggagggcgcgggagttttttattttttttgttttagatagtttttttagtaggagaggtggttttttgtgtagttttagtttttgttagagttttatttttgtttgggtttttagtaggtgattttggtttttggattttggttataggatttttttttttttatttttatttaggggtggtggtggtattttgttgttaatttttaggttatttttataatgttaagaattttttttttatttgtatggtttttttttaaggtattgagaagggttttaattatatgtttatagggttaaatattttttgtaaaatttataaaatggaaaatattttttttataattaattaacgttttcgtttatttttagttttgagtttttgttcgttatatttttttttgtgtgaggtggaaacggaggtttgttgttacgtgggggtttttgttaaggagaagttgaattggaaagatatttagtttggttttggtcgggttatatttatgtagtttttatttatttttatgtatagtttagttattgttcgttatttcggtgtggaaacggattttagtaatattcgttttatttatcgttttaattttatttatcgcgtagaattaaaaattataagatacgaatatattttgcggtgtttggcgtcggaaaaacgtgcgtagtggagagaagtaagatttgaaatgtacgggtttagaagtaaatttgtggaaaattatttttattattagaggtgaagttgtaagtaaaggatttagtttttttaatgtggagttaaaatagaaaagtttttttggttagaaatatatgtataaatgttttatatgtagttagaaattttttttatttttttattttttttttgatgggaattatatttaaaaaaaaagaaaaaaataggatttattagaatttttgtgtattttgaataaaataattgtagtagtattattaattttatgttgatcgttatttttgtatatattttaattattaaaaataaaaataaaatttgattaattaaggagatttattcgttttatttatttatttatttttgagatggagttttattttgttgtttaggttggagtgtaatggtacgattttggtttattgtaatttttgttttttgggtttaagttatttttttgttttagttttttaagtagttgggattataggcgtgcgttattatatttggttaattttttatgtttttggtagagatggggttttattatgttgattaggttggttttaaatttttgattttaagtgattcgtttattttaattttttatagtgttggaattataggcgtgagttattacgtttagtttatgtttttttttgttgttttttttttttttttgagatatggttttatttttttatttaggttggagtgtagtggtatgattacggtttattgtagtttcgattttttgggtttaagtaatttttttattttagttttttaagtaattgggattataggtgtatgttattatgttttgttagtttttgtatttttagtagagacggggtttcgttacgttgttcggatcggttttgaatttttggttttaagtgatttatttgttttggttttttaaagtgttgggattataggtacgagttattgtgtttagtttgattagttttttgttttcgaaatagaaaacgatattataaagttattatattgaagaagtaatgttaaaaatgtgggagaaatagaattttggagatatgattgatagttgattggtatttttttgtatgtagtgatgtttgtgatatttaatagttgtttataatttataatttgttgttatttatttttttattttaaatgaattattgtatttatatttttagagggttgtataagtttatattattttgattttttgttgattgtttttttgttttttgtttggtttttattttttttattatttgtgtaattagtttttcgtttttaagtttttttgttttaaatgtttaagtggattaggtattgtggttttcgtttgtaattttagtattttgggaggtttaggtaggaggattatataaatttaggagtataagattaatttgggtaatatagtaagattttgtttttatatatatataaaaaatataaaaattagtaaggcgtgatggtatatgtttgtagttttagtattttgggaggttgaggtaggaggattgtttgaggttgggagtttaggattagtttgggtaataaagtaagattttgtttttataaaaataaaagaaaaaattaggtaggtatatagtgtgtatttatagttcgagttatttgggaggttgagaagggaggatcgtttgagtttaggagtttaaggttgttatgagttgtgattatattattgtattttagtttgcgtgatagagtgagattttgttttgggaaaaataaataaataaataaataaataaataaataaataaatgtttaagcggtttttattttttggttagattttattatatattttatgaataaatcgtatgtatgagaaaggtgagtagatgaatagggtagggttagggggttaaggggaagattatagattacgtggagcgagattagtggttaaaaattgttaattatagttaggtttggtggtttatgaaggtaattttaacggtcgggtttggtggtttatgttcgtaattttagtattttgggaggtcgacgcgagtttattatttgaggttaagagttcgagattagttcggttaatgtagggaaatttcgtttttattaaaaatattaaaattggttaggtatggtggcgggcgtttgtagttttagttatttgggaggttgaagtaggagaattggttgaattcgggaggcggaggttgtagtgagttgggattttattattgtattttagtttgggcgatagagcgagattttattttaaaaaatttaaaaaaaaaaaaataaaaaattgtagattttaataaggaagagttataggacgatattttaggatgcgggaaaaggttacgttagttttggattttttttgattaatgggtattttagttattaaaggggtagatgcgttttatttaatttttatttagttattagagtataatatagggatgtgttatagatagagatggagattaataggtagaggggtgatggggaggaagattgaggtaagaggaataaaacggggattgtagagggtaggtggtaggagtttgagggttttagaagaaattgttgtataagtaatgagttagtagggtgagtgacggttaggagaggtggtttaagaaaataaagagatattttcgggggtatagatgcgttttgaggggtcgaggaagagatggggaaggggtggttttgtggattttcggtatgattgtcgtggtgaaaaggaattaaagatttcgataaggggatgattttttaaataaggaagttttgggttttcgtagggggattagtagattgagggtaaacggtattttgtttattaaagttttaataaaatgttaaggtaagaatatttgtttggttttgggggtaattttagaaatattagaaaagggatttattatgcgtaatttttttttaattatttggagaaatgtatggttatttaagatagagaaaggtagttaaagtaagtggaggttaggtatagtgatttacgtttgtatttttagcgttttgggaggttgaggtaggaggatcgtttgaggttggaaatttagtattagtttaggtaataataaaataagattttgtcgttataaaaataaaaataaaaattttttgagacggagttttattttttttgtttaggttggagtgtcgtggtacgattttagtttattgtaattttcgttttttagatttaagtaatttttttgttttagttttttgagtagttgggattataggtatgtgttattatgtttagttaattttgtagttttagtagagatagggtttttttatgttggttaggttggtttcgaattttcgatttttttggttttttaaagtgttaggattataggtatgagttatcgcgttcggttgttataaaaattttttaaaaattagttaggtatgttaggcgcggtggtttttatttgtaattttagtattttgggaggttaaggtaggtggattacgaggttaggagtttgagattagtttgattaatatggtgaaatttcgtttttattaaaaatataaaaattagttaggtgtggcggtatatgtttgtaatcgtagttatttaggaggttgaggtaggagaattgttttaatttaggagtcgggggttgtagtgagtcgagattgtattacggtattttagtttgggtaatagagtaagattttgttttaaaaaaaaaaaaaaaaaaaaaattagttaggtatgtagcgtatatttgtagttttagttatttaggaggttgagaagggaggattaattgaaattgggaggtcgagattgggaggttatgattacgttattgtattttaatttgggtaatatagtaagattttgtttaataataataataataaataatgtaagtgggtataagaatttatttatttatttatttatttatttatttatgagatagggttttattttgtcgtttaggttggagtgtattggcgtaatttcggtttattgtaagtttcgtttttcgggtttatgttatttttttgttttagtttttcgagtagttgggattataggcgttcgttattgtatttagttaattttttgtatttttagtagagacggggttttattatggtttcgattttttgattttgtgatttgttcgtttcggttttttaaagtgttgggattataggtgtgagttatcgttttcggttttaagaatttattttattttagtattttggaggttgaggcgagtggattacgaggttagaagattgagattattttggttaatatggtgaaatttcgtttttattaaaaaaatataaaaaattagtcgggcgtgggggcgggtgtttgtagttttagttatgcgggatgttgaggtaggagaatggtgtgaattcgggaggcggagtttgtagtgagcggagatcgcgttattgtattttagtttgggtaatagagcgagattttattttaaaaaaaaaaaaaaaagaatttattttaagatagtaagttttagggttgaagttagtttttatttagttttaggtttaaagttataagtatggttattgtaatatttttatttaggatattattttttaggggtttagatttatattattaaggaggagcgtttatattagtagttggggagagggtggttttttataagatgtaatgtttattttgaagagttattatagtgataattatgaaatttatgtttgagatttaattttaagtgaaaagaatagaatttaatatttattttatggggagtataaaattttgaaaatatacgttttttataattaaattaaattttatgttatgtttttgaggagataagtattgaatggaatatagaagaaatgttatagttaatgattgttgaagttttttttttaattttttgtttatgttgtttggtaataagtaatatagaaaattgataataaaaagtaaaagagaaagaaaagatatagtgtatagtttagattgttttttttaaaaaattaaataataataataaaaagtataggtcgggtgcggtggtttacgtttgtaattttagtattttgggaggttaaggcgggcggattatttgaggtcgggagttcgagattagtttgattaatatggggatatttcgtttgtattaaaaatataaaattagtcgggtatggtgacgtaggtttgtaattttagttatttgggaggttgaggtaagagaatcgtttgaattcgggaggtggaggttgtagtgagttgagatcgcgtttttgtattttagtttgggtaataagagcgaaattttattttaaaaaaaaaaaaaaaaaagtataaatgtaagttgggcgcggtagtttatgtttgtaattttagtattttgggaggtcggggtaggtggattatttgaggttaggagtttgaaattaattcggttaatatggcgaaattttatttttattaaaaatataaaaattagttaggtatggtggcgcgtgtttgtaattttagttatttaggaggttgaggtaggagaattgtttgaatttaggaggtagaggttgtagtgagttaagattgagttattatattttagtttgggtgatagagtgagatttcgttttaaaaattaaattaaattaaattaaataaaataaaaaaaagaagcggtataatataaagtttcggtagttaaagcgttaatttttagttattaggaaggttttgttatttaatgatttatcgttttagttaaggttagttatattttgggtttttgatgttggaggtaatatgatgttaatattggcgagaaatttattattttttttttttcgtttttcggtgtcggtttttgtgtgtatttgtagtttttttattatcggtgtttttatggtgtttacgttatcggtttattttttagtaataattcgatagttcgatatttttgtagattttgtggttatagagttaaagttttttgttattagtgggttttgtagataattttttaaatttttttgggttgagttagttaagtttttaataagttggaagatgataggggttggatgtaatttatttttaattggtttgggttatatggatattattttttttttgggatttgatttgggatggaaataggagttatagtttatgggaaggttgtgaaaggaagtttcggttttagggtgcggattaggttgatttgcggaataaggttttaggggcggtttattcgtttgttttgtttagttttttttggtaattatatttattcggggtttattttaaatttggtaggtaatgttgttgtttttattttagtcgttgttttaatacgtttcgtttggttaggataggtgtttaggtatggtatttagggatattttcggttttcggggtttaatttttggtttttaggtgtagcgttgggaaaagtagagggtttcggttatggcgtaggtttcgttataggttatttaagtagtttgggaggagtcggaaagagagtaatgtatttatttggatagagattgaagttatatttttattgagaaaagatgatatttttgtttggattttttttttgaaattttaggtcggggtggggtaggagttagcgagagagtttagcgttttaaaggggattttttggtttttcgtgttttttaatttagtatttttggggatttatatatttagggtagagtggttatttagggttttttttatttagatataaaggttattgaaggtttcgggttaatatcgttttgaggatgattagcgatttgagtttttgttagagatagtaggtagtttgggtttaagggtcgtttagtgatttgaagttgggattattttatattttttgcgttatttttgttttttgttttggaggtttttaggttgttaatagttatgttttggagaattaggttagattaggttgggaataaagtttagttgttatagagttgtcgagaggttattggtaagtagtgtttaggagtcgttttttttttgttagtaatagtttaatgtttttttttataggggttgtaaatgggtttatgtttagggtggggttagggagataaagtagagagaaattgggttgggagtagagagtgttatgttttattttggagatttaaggttaggttattttgtagagttggtgtttagagtttttagcgtataggagaggaggtaaatagaatttgatatttagtagcgttcggtagacgtttttggaatgaatgattaaatttatatggagagttgaaatgggttaggaattttagggagacgggtagtttatagtttagtagggtcgttttagtagagtaggttaatgttaggttttttggtaaatttttcggggtttaggtataattgttatattaggaaaggggtaggggtgattagtttatcggttacgggggtattttattgtttttatagaagttcggtatttataggtttgggtgatatacgatttttatgtttggtattacgatggttgtttattaagtttttttatttattaggattgattttttttggttagcgattttagattattatgatttggtagttgtcgttaggtttgtttggttaaggattttttcggagattgagttattttatatagtaaagtgagttatggggttatagcgttgtgtgttgtgtataagtttcgagggttttatttagggattggtatttattgatttttataaatttttggtaatcgtttagagttgggatgtttttaaggtaatagttttaataaatagaggcgtaggaatttagcgcgttatttttcgttttattttaaaggtttatatttttaggggtttggagtttttttttggagttttttttattttaaagttagttggatttgtttaggaattgttattattattttttggtcgggtttgtattgatgtgtattgaattttttttattaggtttattttaggtaaattttagagtttacgtaatattgtttgtggataaatattggggcggaaataggggttatttttaggttttagttatatggggttgttagggttgtttgggatggtaggagagtgttagaggagggtagtttaaggattaggtagggggtgggaagtgtttttttttatgggtttttaagtgagatgttttttgtaaatatttatttgggatttttaagtagagggttggtttttatgttatttggatttggattttagattattgtttttaagtggtaattttgggtttttttgtatttgttttggtttgagttggttatatttgtggggggtggttttaggaagaaggtggattgtcgtaaacgtaatgtttcgttgttaggtgtattgttttcggttattagaatttttttgggtaggtcggggagatttgacgggtaagtgtttgcggtttggcgtgagcgggtagggtaggtggtttttgtttgggtatgtttttttatttttgtaatagattagggagagggttggttttaggatttaggtttagttagttgttttataattgaggggtttcggcggaggatataagttagatagagttatagattaatcgtacgaggtggttttttttttttagtttaggttttttgaatgcgttagagtagataagtttggacgtgaggaggtaagaggtagcgagaataggcgcggagacggggttgggggagaagaggaagaaattttgtgtttgtgttttttttacgttcgtttgttatcgggttagttgattggggaagtgttttttgagggtgtaattttttgtttttttcgtaagttagttttcggggcgttgggtgagggtgtagttttgtttattacggcgagttagtatattgaattacggtagaagttgttttttgtgtgggtgtagtttttttttttgtttaggatttagaagttacgatagtatagagttttttaatcgtggttggtgtttttttaggaattttttgaaagttatagagaaattttagagtggttgggtacggtggtttatgtttgtgattttagtattttgggaggttgaggcgggtggattatttgaggttcggagttcgagattagtttggttagtatggtaaaattttatttttattaaaaaatataaaaattagttgggtacggtggtatatgtttgtaattttagttatttaggaggttgaggtatgagaattgtttgaatttgggaggtagaggttgtagtgaatcgagatcgtgttattgtattttagtttgggtaatagagtaagattttattttaaaaaaataaaaaataaaaaaagaatttttagagtaatttttaggtgttagtaggggtgtgacgtaattttagtttcgtttttgtggtttatcggtttcgggtaagtttttttgtcgttgttatttatagagagtttttaggggagtttgggaatgacggtaagttttatgtgatttagtatgtaaagggagttttaaaatttagaatttagagagttagggcgggtatagtgtagttggttttagtgttgaggggttgggggagagattttgtattatgttttgattatagtaagggaagattatggaggtttttggaacgttttagtaatggcgtaattttagttttttttatttttttgttaatgataattatgattatgatagtagttaataggttatagagtaggtattttttagtttttttaaatatgaattcgtttaatttttataataatatagtattgttttatttaataaatgaggtaggttgggcgtggtggtttatgtttgtaattatagtattttgggaggttaaggtaggtagattacgaggttaggagttcgagattagtttgattaatatggtgaaattttatttttagtaaaaatataaaaattagttgggcgtagtggtacgtttttataattttagttatttaggaggttgaggtaggagaattatttgaatttgggaggcggaggttgtagtaagttgagattatgttattgtattttagtttgggagatagagtgagatttcgttttaaaaataaataaataaataaaattaaaaaatattatatatataaaaaaataaatgaggtaaatgagatgtatgaggtgagaattttgtgttatagggagaggcgtagtttggtgagatttaattttaaggggttggcggttttgagtttttaagtgtaattattggattatattgtttgtagattattattatttttattttattggaaggtcgggtgaggtaatcgggaaagtttggagtagtagtggagttgttagagagaatttgtttttagtgtttttttggattttgtagttgttttgtgtgggtttttgttgtttttcgtattggaaaagatttttttatagatggggttttatgacgttatttaggttggagtgtcgtgtttatttttaggcgttgttatagggttgtagttttgaatttttggttttaagcgatttttttgttttagttttttgagtagttttttgggtttaagcgattttcgtgttttagttttttgagtagttttttgggtttaagcgattttcgtgttttagttttttgagtagttgggattttaagcgtatttggttaagtttttttttattttttattatttaagatttttttttttttaaggtttagtttaattttatttttatttaaaattttcggggtatttttgtagtatttggaggttgaattgtttaggagggaagggtgttaatgagttggtgtttcgtttttattttgattttcggtgagaatgtaagttttttgtaggtaaggattatattttattattatttttgtatttatttagatttggttatgtgtgtttagtatataaagtgttttcgatgattgtttatagatttacggtatttgagattgttttaatatatttttttaaaattttttttttttttagaggtttacgaatgtttaaattaggtttatcgggaataatattatggttatttcgtttattttgaagtttatatataggtttggaagtaataatttcgtatagtttagatgaaaaaataaagatttttttgttgtttttggattgttagagttttgggggatttttaatattttttgttgttttttttaattttatggtgtcgatggtttgttggggggttagtttgatttttgcgagtgttcgtattcggaaaagggttggtgttaagatagttttaggatatttagaatgagggtaagaggttatttttattattagttttttttagttttattttatataattgtaatatagtgatttagtatattttgggttattgttaagtagggagtaaattagaaatggtttgagttttttttttttttatttttagaggggtttgtttttttaggtaaatataaggaggtatcgaggttgttgtataagagttggtttttgtttattttataaattttatttttatttattgtaaaaggttttgtttttttttttaaaaaaaaaaaaaaaaaagaaatttagtgaggggtggggtaggtgtgtgtggaggagaggagaaaaggataagtgatggtttttttattttttagtaagtcgtaggtgtagagattttaagtttgttttagggttttttcggtatttgtgtaggagggttttcgtagaaaaaatttaggatttacgatttgggaggatttcggttatttttattgtttggatttattagtgggaggtaaagtgtaagaaattaagggtaaagggttttttttgggcgggttagagattttttggaaagggttatgtatcgcgcgatttttataataattttaagtatttggagtatgttggggaggaagtttcggtgttaaaattaagtatgtgttatttggaagttcgttttcgtttattagtatattaatttatttacgtttttgatagagttgtgtttcgggtgcgtagagggttattttgttcgtaataatcgggtgaaagttgaaattttaagttattgatttagaagggtattttcggggaagttttgagtaattttttttgagataaggtattttattatttattttggtttttaaatatggaaagttagaggaaatcgataatggtttaaaggtagggggatggtttcgatgatttttttatttttaattaaggtttatgattttgtttttttattaataaaaattaatttatggatttttggtaggtatttttttatttgaatgaattaaaggagggatattaaataaacggtttttagatttagaagaggagacgttatttataatttgaggattgaggaggataaaggattttgtttgtttggattttttggagaaaattataaaggaaaaaaaaaaggaaggaaaagataaataatgaagatttggattttttttaatttgtttttgtggtttcggtgtgtttatttgtgaaatggaattttagagtgttagagcgggagttttttatgaaatgaaagtttttgaatcggtttatggtgaggtttaagttaggtttttttcgtttatttaaggcgggttttgttagggtggagtgaggatgttagtcgcgggcggcgttttgagcgtaaaacgtgaattcgagtcgttaagtttgggcgttgttggacggttttatttggaggtcgtttcgtgttttattaagtagaggagaaatcgaagagaattcgaagaaaggatgttgcggtttggattattagttttagaggttgaatttaaggatatttttttatttagtttcgattttatttatttatatagacgtatagggatttaaagtattcggtcgatttggaaagttagcgatttttgcgagggtgtaaggggcgaggaagagggagcgttttttagggtagttttttcgatattcgagtaagggttggagatagcgtaggggacggtcggtttaggtcgaaagcggttcgatagcggttttgttttgggaggaattcgatttgtagtgtgttcgtcgcggggattcgtttagtttcgggggcgtttcgttattttcggtcgtaggtatttaggtgagtagcgttggtttcgggatatcgatttttttttatttcgggcgcgaagtttatttgagtaagatttttttatggtgttttcgtggtcgtcgtttttaggaaagtgtggcggcgaggtagcggggcgcgcgtttttagggcgttaattttgggtcggtagtaggaaggcgggaagagggggcggttcgtcgtttggagtgtatcgatcgggtttcgtttcggtttcgttttcgtttcgttttttttcggagatgcgtatagaatttcggtttagtcggttgtggtttcgtttttgattcgtttttttttcgtttcgtgaacgtgcgcgtcgagttttattttcgtttatttttgcgttgcgttgtatttggcggagcggggttggcgggcgtcgggtttgggagggggcgttttcgcgcggtagcgtagattagattagattaggttaggtcgggggtgggggtcgtttgcgtggttcgtcgcgttcgtagttttgtatttttagtttttcgcgttggcgttaatggttggtttcgggagtcgtcgtattttttagtttcgagttcgggcggggcgggttcggttaggtggaagcgggcggaggtgcgggcgtttcgggcggtttcgtcgggcgaggcggcggcgtcgggtatcgcggcggcgtcgggtatagtcgggggtcggagtcggggtgtcggtttagtgggtcggggtagggcgggataggatatttgttttgttatttttttggtaattaaaagggtagagtgcgtcgattgagttggagttttagtttttttatttgtaaatgggcgcgttggatagatgattatttgttttttttgcgttgggtatcgtgcgtagttcggtgtatcggtgtagcggggtagatatagggagtcgttttttataattcgggtaacgtaggtagtggtgagaggatgtaaaatttgtacggaagaattttttttatttggatatttttaaagtttttacgataaagcggtgtttttaacgtatagaggaagaagtgattaattatgattggagggtggtgttagagttttattgaggcgaaattaaaatagggttttaaggaatgagtaggaattagttaggtagttaaggtgatggaaggtagttgttttcgaaagagggaagggcgtggcggagtttgggaggtttgaggtattatagcgagtgtggagagatagaggtagggtcgggtttttgtatagttgttaatggaggtcgtagaggacgagaggaaggcgggaggttagttgggaagcgttcgttagttttgggtaggggcgtagtattgtttttttttgtagtttttttaaaaatgtataggaggttgaaagtgttattaatagtttcgaaaaatttttttttttttttttttttttttattttttttgggggtttaagaagtatttttattttttgtttgagtgtgggaaatttatatgtatgagaacggaggtttatgtggtatcgtgggttcgtttcggtttatttgtttttttttttgagtaatttgtttagttatagttttgtagagggagtagtttagttagaggagtttttttttattttaggtagagttgattggatcggagtggatattggattttaattgagtttatttttttttttatttgggggttagaggtttaggaggtttcgggagggaagtgttgtaagggaggggagtagggagtatggacgaattgtgaatagcgttttggattttgggatgtttatattttaatcgtaatttttatttatacgtttatttatcgtttgtattagtattagtagatttcggtttaggtcgtgttttgatttggttagtaagtattatgatgatattgtttttagtttagttatgatgatattgttacgagtttaatgtttgggatttttaaagtttagcggtgttttaagaatttgggttatgggtgtattgttggttttgtttattttatttagtataagttagaggtgttttggagtatagttattttgaggatgttagttttggttgttttttggttttgggtaggtgggtttttttgcggatgtttacgtttttgtttggggttataatttataggaatttgggtatttaggatttaaggatatttgcgtggagtgatgttggatatattatatgggtgttttttgtgtgatggtttttggatattcgaatttttttttcgattttaagaaattagaaagaaggataagagagagggagggaaggttgggaatgagggttttatatatttttgagatgtatgaagtttaatttgttatgaaattagagttaaaaaaaaaaaagaaaaattaaagagatgtacgaagtttaattgtttaagttttaaattttgtttttatttatttatttttattttttattttttgagagggagttttgttttcgtcgtcgaggttggagtgtaatggtgcgattttagtttattgtaatttttgttttttaggtttaagtgattttttagttttagttttttgagtagttgagattataggtgttcgttatatttggttaatttttttttttttgtaattttttttttttttagtagagatagggttttattatgttggttaggttggttttaaatttttaatttgaggtgattttttcgttttagttttttaaagtgttgggattataggtgtgagttatcgtatttggtttatttatttatttatgagatagagtttttttttgttatttaggttagagtgtagtggtatgattttagtttattataacgtttatttttcggatttaagtaatttttttgttttagttttttaagtagttgggattataggtatacgttattataatcggttaatttttgtatttttagtagagacggggtttt

SEQ ID NO: 7 - DNA, 52626 bp, Artificial Sequence
  chemically treated genomic DNA (Homo sapiens)
ggaggaaggagaaggagtttattgtaaataataataattaaatagtttgggttgggttagtaaagggtgttttgggagtgtttggttatttttgtattttattttgttttatgtttgggtttttatattttttttttatttgtgtttttttttttttaaaaaagatgtaagtgtaataatttattttaaaaggtaagaatgttttttttaatattttgttataatgtagttatatggtggtataggtagtaaaattttatggaattgattttatttttttttttatatttttttggatttttattgtatttttaatatatatttttaatattttattttaggttattaagttaaaggaaaagttgtatttatatagggttaaaatattttataatgagaataataagtaatggttgaggtttatgttttttttagtatttagttttttttttttaattattgtatatttaaatagatgattagatattgaaaattgttttttaaaattagtagtataaaggtttagttttatgtgtgtgagtgaagagggaagaaaggagaggttgaggttaggttatggaagtattttttttttttatagtattttgaaagaagtgaagtggggttgatgggttattgttatttttttattttttaattggatagttatagagtattattttgggggttagtttattaattatttttttttagttaggtttgtttgtttttgtattggatagtaagggttatgaaatagattaggaatttttgtgtgttttttaggtttttgaagatggttttttattgtttagtttagggagggaatgattgtataagtagggtatgtagtttttatggaagtgttttttgtttgtttagttgaaatgataggagatggggtatggagttgggtttagtgtgattatagttgtgtgtgttggggatttattttatatttgttgtatttattttattgtagtgtttttgagttaatttggttattgtgttttttgaagttggaggtatggtagtgagtgttgagaattaagtatagttaaaagaatttaaggaaagttttaaaagtttatgttttttaagtgttattttagttttggagataagtttttttgtgtgttttttagagtttttgtttttatgttttaggagtagtgttggtatttggagggtagtagtagtattttagtgttaagttttgttatgttgagatttgtgtttagtagggattggaggttgttagtgtggggaggttgtttatttatttgttggttatttatgattttatttttaagttgttatttttgttgagattttaggtaggtatttaaaggaaatttttattttttttagtttatttgtatagtaatgaattatgtggtaggtagatgtttttttttatttgtttttatgagttttagttttagatggttttgggtagttgttttgatttgtttagttattttaggagttgatatggtagtggttttttgttttgtagtgtagaaggttgggtttagttatttgttttggaagggattgggttttaaggtttttttttggagaattgagttgttgagtgaatgtttatgaggtattggagaggggagttttatgtagtattggttgtttttggtgttaatgaagtttaggtttttatattttgggtggtatgttttaggttttttttttagtttagttttagggtaagtataggttagggtagttatgtttttattttgggttagggttttttttgttgtgaagggattggattaattagagggtttttaagtttttttttaatttggtggttttattatatttagtgtggttaggtggtttttaagggttgggttaagttatagaggataggtttggggtatgtggttgtttttgatgagatgaataggaatgttttatattggtatgtttaattttagatattttttgggtgtgttgggataggtagttatagttatagagttttttaatagatgttttttttttttaagtttttgggttgaaatttgtttgatttgggtttagtttagttagagagtagatgtatggaggaattgagtgttgggggttattgtggaagagtttttttaaagtttttattttttttttttgtttgttttggagttatttgtttgtttttttttttgttttgatttttttgtttttttttttggtttattttggagttatttggttttttttttttttgttttgatttttttatgggtgagaaagatttaaggtgaaagttttttttttttttatttttttttagttatgagtattttagaaggaaaggggggagaaatggggaaattgtttttagttttaagttttttttttttttggttagattttgggggagtttgggttattttagtgaattttagaattagaaaaaattttttaaaagttattttaaatttttaaatatttgaaatatttaaagttaagtttttaagaatatttaatttaatgtttaagatttttttatttttataagatttattttagagttatggtttataaagaggtttgatttattaagggaggttatagttagatttttttttagtttggtttttagagtagatgagaatattaggtaggtgggagattgttatttttaattttagagatttttatttaataatattaagtttattttttgtttaatttaggaggtttttttgtgtttatgattttgagtatagtgggtttggttttattttatgataggaattaagggagaaggtagaaaaggtgagtgttttaatgtggggtgttgtttgttggagggattttttatttggggtttgataggtttgtttttggatggttattgtgtatttttagttgaggtgagggttggggtttagggttagatttaagttataggggttgggtaggtaggtatagagttttgttttttggaggtaggaagtttggttttaggagggtattttgatagttttatttgtaatagtaaagttatattgaggagtttaggttaggagtttttttgtaggttggagagagggtagagagttttggtttttgtggaagaagtgtaaggatggagtgtggaaagttgtgtggagaagagtaatattttttagtgtttggagggatatagagtttttatttgttgtggaaggttttgggtagtgatgatattgatagatatggtagggaggatagttagtttgaggttatagtagggtttggaggttgagtatggttatatgttttttagtaaagtttgtatgtagtttttgattttttgttatttggtttttaagttttagtttatgtgttttgaagttgtgagtttttttatgttgggatattgttgagtagttttagggaggggttagggtagggtagggaagagatgagtttttttgtatttttttggagggaatttgattgggttttggatggagaataaagttgtttagatttttttgttgtattagatgttaggtaggttggagagtgggaggattgtttgggtttatgttttatttggatgttttttttttttttaggattttttttttttttagtattatgggagtttttgtggtatttgtgtttttagttttttttaggtttggttttttttttatagtgtttagtgaggggttggtttgtgttttttttggggattggtattgttagatggtagtaggggtttttggttttagtttttgttattttttgtttattttttttaggtgtatttagtttaggggatagttaggatgtagttagttaggttttgttagatttgttattgtttggggggaggtggaggttggtgttttggttttagtaggttggattttgtgtgtttttagggagagaaagatgggagggtaggaggttggttttgtagggtagtttgtgttttagatatatagttattggtttggtgattaggggattttattaggagtgggaaggatggataagattgggttggtgaggttgttgggtttgtatggaaatttagtattgatttatggttaattaggtagagtagaggagtgggtgggagtaagaaagtgtttttagtttattatggatgtgaagttgaaaaatgtggttatttggttttttttattgtttgtggttgggagtaggggttagggttttagtgttagggaggggttaggggtttgttgtttttttttttttagtagtttatggggttttagatttggggtggttgaaagtgttgagggttaggtttttggtttaggttaggtttttaagaggaaagttgagtgggaggttgggggtttggaaaatatgggtgtggtttatggtgttttgaggtggggatggggtaggggtgttttgttatgtggtttaggaaatggttgtattgtgttttttggtttttatgtggagggttgtgatgtttgaggttttgtggtttggtttgttgttgagtttgtagttattgaggtttgggttgaggttggttgttttaaataggttgtttatgtgtgtttggtttatgtgattgttagttttagatatatttaggaagttggtgatgttgttggttttagagttaggggggtgggtatgaggggatatgtaggtaggtattgggttgtaggggattatgtaggttggtattggtgaggtagttttgttgttgttgagttaggatgggttttgaatttgggagaggaagggagagatgttattggttggtgggtaggtgtggtgtggaaggggtttgtttttttttttagagtatttttttttttattgtttattttttttatgaagttttttttgagtgtttagttttgatggatatttagatatttttgtgggggtggtttttatattttggtatttttgtttttagggttaggttagtagtagagggaaatttagttttaaagagtgattttaggttttattaagggtttagtggaagggtgatattttagtattttttagttggttttttatttttagatttaattgtagatttggtttttatttgtggatggtagttgtgttttatttatttttagtttttttttaggttttttatatttataggtatttgagtaaggtgagtagattttaatttggagagttttggttttgtaggtttttttgggtttttattagtagtagggaagatggaggggttgggtgaggtgggtggtagggatttaaattttttagaaattaagggttagtggttgaggttttagggtttgaattaggaggttttagaattaatttaggatggaaggggttgttttaggagtggatagttagatttgagattggatttttttgtgttaaaggggtgagggtatgtgtagggatgagttggttattttattttttatttgtgttattgggttttttttttttttttaatgtttatttggggtttttatttttttttattttttaggtatgtataaggaggtagaattagggtgtgggggagatttgggaattttttagtttatgtatatgggatttttggtaattttatgtgggtttttgttggtttgtttttttgtatgtgtttggagtatatttgagggaggtattttaaagtagggagaaagagtttagtttttattttggagggaattgtatttttttttgtggtgtaggggaagggggattggttggtttttattatttttttttagaagaggtttgagtatatattatgtggtgttgtaggtgaggtgggggtaggaggggtgaatagggttttgtgttgggttttttttttagttgtgtgtttaggtagtagagtttaaagttaaggagggagttagagttttattttgggaggatagagggaggttgagtttagggagggagaggggagaaagagaatggaagaatatagtgtgagttgatgttgatggtgtttgtgtgagatattttatattttttagttttatttttaggtttgtgttttgtttttttgttttatgaattttgggttgggggagagggaatagagggttggtttggttggagagttagagattatttgttagtatagaattaggttagggagaagtaaaggaggtaggggtgtttgtgttattggttggttgttgagtagggttaggttgggagttgaggtggaggttatgttagaatgaggtttgagtaggtagggagtagttgtttttgttgggtaggttgagtgggggttaggagaggatttggatttggttaaaaatatatttttttaagtattttatgtgtttgatgtgatttaatattttttattttttgtattttatattagaataggggattggttgatagatatttagggaaaatgttttggggggaggggaggatagggttttagaagttgagtataggtatataagttttttgaaattgtataatttataaaatatttttgtatgattgaatttagattttataattgtttgataatagagttgagtagatgtttttattatgtttaaggtataggtgaagaaattgaggtttagagatttgagatttgtttaaagtgagaaagatttggagttggaaagataatttaagtttttggatttagaattttaagtttattttaatttggttatgagttttggagattttagagtttgttttttgaagagattttttgagtggtatttgagggtttggtggttttttgtttgttttggttttgatgtttatagtaaaagtggttaaagttagtggaggaaagagttgtttttattgttttaatttttttttttttaaagtttagttaagtttggtttaatgattagttggatagattaattttgggttttttatattttggtataaataggtatatttttggaatgagatggaagggtagtttggagttataagttattttggggtgtttgggtttttttttaaggggtttatttttagagtattaggggttggggattggtggtggtagtttagggtgggatttatttgggtgtagtttttagtttgggtgaggaggggtagtttatatgtagtggagaagtgggtttgaatttgttgtatttgtttaaaatgtttttgttttttttatttggttttttggttttggaattagatttataagatgtgaaaaagttattgttattagggtgagatgtttgtttggaggttttatttttaggtagtgtaaattgtttttttgagttttttattagttgtagtgtgtttgggaaatggtgtggttatatataaatattaattttggtttttgtttttaagagttgataatttagaattatttattttgagttgggaaggtattttatttttattagttatgggtgtgattttgagttagaatttttatttttttaagtttgagaatttagagtagttaagtgttattatttataaaataagttattggttattttagtagttatttaagtagatttttgtggagaagttgataaaagttataaatgtttttttagatgtgtttttttagataattatatatagttttgttatagttttttaaaaggtttatggttttttaaggtttattggtttagatttataatgtttttttttttgtattttgtttgtagtttttttgttggagatagttttttagtttagaatttttttgtgttaaagggagaataggggttttgttgggtaatagaggtagttagggaagattttttggaggagggataggagttgggttttgaatggttggttgaaaggaggaaagttaaggtttaggtttagaaatagtaaggtatattttaaaaatttaaagaggttaatttgaaggaagtggtgggagagaaagaaatagagttagattgtagggggttttgattgttaagtgaagggttttttttttggtgttgtttgtagaggtagttgttataaaattttgtgtagaagtgtggtttgatggtgagaggaagtggaggttaatttgttattgagtataagtggatgggatgttggtttgattgggagtttaatgggggaggggaggtttttgagttagttgtgagtattggggtttttggtgatggggagtattgggttttttttttttgtatgagtatttttggaaggttgagaatttttttaaggtttaagagtaagagttgttttatttttggtttatgatttaggatttggagaaggggtgatggggatggggtgggtgagagagggagagtgaggagggattagtttttaggttaggaatggttttaggttgatttagagatggattgtggtgttttttagagggaggtttttgttagtttgatgtgtatttgtttgttggttttgtagatttagatgtaagtgggtatattttagatagtatgttgtagattgggagaatagagttatgataatagttttagttgtagagttataaggagttttgttaggtttttttaggtttaggtattaagaaagttaatttttttgaggtttagtttttgttttttaggtggaaatatttttttatttattatgattaatgtagttgttgagttaaatataggagttagtttttaaaatttttttgttttagagtttttgagttttttaggaattattgtgaggaggggagaaggaggtgtggatgtgtttttttatagatgttgtttggtttttttgggtatttagtgtagttggttaatggataggtttataggagtattggtattgttaagggttttagtttttgtatggtgaatggtattttatagttgtagtaggggagatagatgggaaatgtagtttaagaatgtttagagtattttttatttgtttttttatagtttttgattttttttattgttttttgttagaggaaagaggttaaggaagatggggatgtattttatgttattgtgaggagggtgggggtgagtaggggtgtatattattatgtttttttatttttgtattaatttatttttttttttttaattttaagtatgtgtgtgtgtgtatgagtgtatttattagtgtggttatatgtatgtgtatgtgtgtatatatattgattgggggaggagaagttttttttttagaaatggattttttttttagtttggggttttagtttttgttttggttttttagggtttttttttttttagggatttttagggtttaggttttggttgtttattgggagttaaggatagatggggttttttttttgtgttgttgaaatgggatttttttttattagtggtttgggatgggagattggggttaggatgagagaatgaattagaggagtttgtttttattttatgtttaattttttgtaggtttagttttgtttttttgttttttttttagttttttagggttttttgtgggggaagttggggggaggggagaagttattggaggtatggagagagatggtttttttttttttttttgttattgtgattgttggggttttttttgtgtttttgtgggttttaggtttttatggtgggattgtggaagtggaagatgtttttataggttttggaatagaggatttagggatgggtggggagggattttgaagagggaaggaggtggttagtgtttggtaaaggggtttagagtggagggaggagttatgtgggggagtggaatgtggggtgtgggtttgttggagttgagtgtgagggaggaggagatgtgggttatttggggaagatagatgattaggtgggggagaggttagtagagttagtattgtttttggaataggagtggaagaaggttaggttgagggatttatttgagggttgaagatggaaatggtgagaggtgggtgagtgattggtgggagtagggttgtttattttttttttttttttttttttgtttttttgttttggggttttattttgtgtatttagttttggtttttttgtttagatttagatatgagttaggtgagtttggttggtttttaatattttttttagtaaattggaggtagtaagggtatttttatgattttttttatgtttatatttgtaggttttgaggtttggagtgtttatttatttttgatttttggtgttttaggggttttgagagtttttttttagatgttatattaatttttatgtttgtttttgtgttttttagttttgtattgtaggtttgtttttattgtgtagttttaggaggatagttaattatgaggtttttattgtttttttggtttgaatgttatattttaggattattttagtttgggtttatttagtataggttttttttgaggattgggttgtgtaaggaattaattgttttggtggaggttttgttaattgtagtttatttggggttagggtggggtggtttagggtggggaggtttttgttttattgtttttagatattagttgtagagattggaattttagatagtagagagaggtttttgtagttttttggagtagggttaaattttaggtttttttttaggaaaagtttattttggggtttttattgttttgtttttgtttttattattattttatgttaggtatttggtttgttattagttgagtatgggttttgaataaatatagtagaggtaggtagggggttttattattatttttttatttttttagggtattgttaggtttagggtttaatttagaggtttgatgtatatgaagattttatttattttgttgtttttatataaagaaaagtttttgaataatttggtatgtgtttttgtatagtaaattaaagttaaagaagtattaggttgtgatttaggagttttggattttagttgtagtgttgttattgagtggttgttgttaattttaggttatgattttttatttatgggtttttttttttttgtttattaaatgggaagatggggtgattatttttagtattattgttttatagttttgtggtttttttattaggtgataagatatgtagtatgttagagtttttttttttgttttggttgttaggaagttttaagttgaagtttgtgtttaatggtaattatgaattttagtttaaatttttttttattatattatttttgtattttatgttattgtttttgtttttagattgaataaataaatttttaattgtaagttattttaattttattttggaagtaggtataagtgtgtgtgtgtgtgtgtgtatgtgtgtgtgtagagaatattttgttttagttgtatggtggtaattgaaaaatgttttgtgtgtttttgtttttatgttttgtatttaaggtgttattttttttttagtatttagtgaattttatttttgggtatttttatatatttgttaggaagtatgtatgtaatttatatatgtaaatataaatgtatatatatattgtatagaaaaggaataggtttattttatattaatatagtatttatagggttgttttataattagttatgtttttttttttatttatatttgtgggttttttttaatttatttgttggagattaggttagatgttaggatttttgtttaaatttaggtatgtaaggttatgtgagtggttggttgtttaaatttaagtgagatttgggtgtgtgagggtttttggatttataggaaagttttagttgttttgttattttttattaaatatttattaggtattggaggggaataaaatggtagttttgttaggtgtagtggtttatgtttgtaattttagtattttgggaggttgaggtggtggattatttgaggttaggagttgaagattagttaattaatatggtgaaattttatttttattaaatatataaaaattagttgggtgtggtggtgtatatttgtaattttagttatttaggaggttgaggtaggagaattgtttgaatttgggaggtagaggttgtagtgagttaagattgtattattgtattttagtttgggtgatagaataagattttgtttaaaaaaaaaaaaggtagtttgggttgggtatggtggtttatgtttgtaattttagtattttgggagattaaagtaggtgtattatttgaggttatgagtttaagattaatttggttaatatggtgaaatttttatttttattaaaaaataaaaaaaattagttgggtgtagtggtgtatgtttgtagttatagttatttgggaggttgaggtatgagaattgtttgaatttaggaggtggaggttgtagtgagttaagattatattattgtattttaatttgggtgatatagtgagattttgttttaaaaaataaaaaaataaaaaaaaaatggtaggttgtttttagggaatttatagtaatttaattgtgtagttttttagtattatttttggtagttgtagtttttgaatagttatatatttattgataattattagtttttttttatattagttattttggaaaaaaagtttgtagattttattagagatgtttttgtttttttaaatagaaaatggttgtaattgatgaattttttattgatgttttagaataatgttgttgaagatgtttttatgagttaatttaagagtttttggggtttgttgaggattgtagggttggggtatttttgttttaatattgaagggtttagtttattgagttgtatggtgttttgttgattaaaaaaaaaaaaaaaaaaaagatttttttttgttttgaagttattgatttttttggtttattggagagggaaaaattgttatgtggtaatgttttatttgttatttttaatatgttttgggttggaaaagtggattgattatgatatttattttgtgttaaattgaaatttaaatttgagtgtgtgaattttgttatttgtattttggttatttatgggttttttttttttttttgattttttttttgttgtgaatttatgttggttggggtagatatagttttttggataagggttgattgatttatggatatttattttttagatttgatgttttgtgtttggttttttttaattggtgggaatatagtgatgaataattagtgtttgattttaaggaaattatagtttagtaggaggggataaataagtaaaataatgtaagttagttaataattttgtaaagaagataaaataggagttgggtatagtgttttatgtttataattttagtagtatgggaggttgaggtgagggattatttgaggttaggagtttgagattaatatggataataaagtaagattttatttttataaaaaataaaaaaatttattttaggtgtggtggtgtatgtttgtggttttagttatttaggaaattgaggtgggaggatttattgagtttatgaagttaaggttatagtgagttatgattatattattgtattttatgttgggtgatagagagagatttagtttttttaaaaaaaataaataaaaatatttaaaagataaaatgggtttaggtatggtggtttatgtttataattttagtattttgggaggttgaggtgggatgattattttagtttaggagtttgaggttgtagtgagttataattattttattgtattttagtttgggtgatagaatgagattttgtttttaaaaagaaaataaaaaaaatttaaaaaatttttaagaagataaaataggatagtgtaataaaaggtgagttggtttgtttttgttgtgttgggttgggttgagttttattgggttgtgttgagtgggttgagtgtgttaggttttattgtgttgtgttgtgttaggttgagttttgttggaatgtgttatattgggttgtgttgtgttggaaggggttgtattaggtttagtatgttgagttttattgtgttgtgttgggttgagttgagttttattgggttgtgttgtgttgggttgggttgagttttatttggttgtattgagttgagttgagtgtgttaggttttattgtgttgtgttgtgttaggttgagttttattggaatgtgttatattgggttgtgttgtgttggaatgggttgagttgggttgagtgtgtttagttttattgtgttgtgttgggttgagttgagttttattgggttgtgttgtgttgggttgtattgagttgggttgagtgtgttgagttttattgtgttgtgttgtgttgagttgagttttattgggttgtgttttgttgggttgtaatgagttgggttgagtgttgggttttattgtattgtattgggttgggtgttttggttgttggttggtaataggggggttattgttttagttatagtggttaggaagattttttagaggaggtatgagttgggatttgaaaaatggagggggatgtagttatttaggtagaaggaagagttaaattgttttttgtttttgtttattgggatgttgtggatattgtttttatgtttgttttgttttttgtttaagagataggttttttagagtagggataagtaatttttttttgtgtgaaagagttaggatttttatattgtgtaaagtttagaaatagttagtagtagtttttttgtttttttgttggaggtttttttttttttgtaattttttattatagtgtagaagtttaatattaaagaggataaaagtagagttgttttagttgggataggggtatgaggggtaggttaggagtttttatttttaggtttttaatgaattgaggaaaggaaagttatggtgtggttggtgggtagttaggagattttaattgtagttaagagtttagggataggttttgttttattagttttatttttaggtggtttttattgatttgtatgtgggttttagtgaggtttgtttttatggttagttgtttttgtgtatatatgtttgggtagtgggttttttggaagattttttttagtttttttagttggtagttggtgaaggtggtttggttttgttgttttttgtttttgttgttttttgagttggttttttttaatgggttggggaggtttgagttggtttggttttggggtttttttattttagtttttttgatatttaggtagttgttgtttatttttatagtgttagagttagggggtaattttggtttatttagggagttttttttagttgagggaggaggaaataaagttagaaattaatggttgaattaaataagagaaggggaatgttagggggagagtggggtatttgggtagttattttttgtttttttttttttagagtttattggatgtgaggtttggagatttggtttttaattttggtttgttattaatttgttgtgtgattttgggtaaattttttttttaatttgagtttttttattattattttagattaggttttttttagtaataatgttatgtgaatttaaggtagttaatttgatttttgtgatttttaatttttattttattgattttgagtttttttttttagagggattttttgtattaggatttttttggggtttgagaattttgattttagtgttatggtttttttgggtggaagggaaatttatttagtagttatgtttggtttagtggggtttggggtgaggaggatttaggattgaggtagataggagtgtttttttttttttggtttagttttattaggagtttagtaggagttgtggagattttgttttaagagtttagtgttgaggagttaatatttttttttttgttttttaattttgtatattggttttatttattgtttaagagaagggttttttttttttgggggtgtatgggattgaggtatgggttatattttttgttataagtagtttttgtttattgtttattgaggttgtttgggtatttttatttttagtatgttgattttgggtttgggtgggtgtatatgagtatagtttttagttattgtgtttggtagatggattttttatttattggtatatttttagtttaggattgtaaggatgagttaatttatatatattaagaaagaagaggtggaggttggggtgggagagtgaggtaagaagttattttattattatatagtttggtgagttttttaggtagatatatttattttttggtagagggtttgggataatagtttttatttttttggtattagggattggttttgtggaagataattttttttatgggtggagaaggttgtggtggggtatggtttggggatgaaattgttttattttaaattattaggtattagatttttttaaggagtatgtaatttagattttttatatgtatggtttatagtaggatttatgtttttgtgagaatttaatggtattgttgatttgataggagttagaatttgtagtaatgtttgtttatttgttgtttattttttgtgtgtggtttggttattaataggttatggattggtattggtttatagtttgggggttaaggatttttggtttaggttatggatttttgatagttttgttatgaattttatggttatgattttttagttgtgtgtttaggagagtttatttatttgttatgtgttttagtttttttttttataaaatggggatgaagatatttttaggattttttttatagggtagttgtgggaaataaagaggttagtgtgttagttatgtagttttgttattattgatatttatatttttagtttggatttgtaaatttatagattttgtgaatattagaggattttgattttggagaagttttttaagtatgtaggtttttgggtataggagtatgtgtagggtgtgtatagatgtttagggaagggtagttaattgggtgtttgtagatgtgggtgtgaattttttgagaattgtattttttgtttgtaatttggggaaaaggaatttgttgagtgaaagaataaatataattaataagatgtttggggagtatttgatatgattttttatgtgtatgagttttgattattataataagtatgtgtggtaggtgtgagtattagttattttgatttgtggtttttttttttggaaataggtttaagtgatgggtattaagtgttagaatgatgtttttagtttaggttttttgattttatttagattttgagggttgaagttttagatttgttttatttttggttttttgtgtatattggggaagttgagagggatatttggtttgtggtatttttgtttttttttttaaggtattaaggaaagggtatagaggtgagtgtttagagtaggtttgaaagtagttttaggaggttgtttttgagggttattggtagtgtagatgttatgggggtgtatgattggtttagtggtattatgtatgatatttgtgtgagtttaggtatatgtagatagttatggttttagtgataatattttgtaaattgtagttggtagttgggttaagagtttttagtaaagatatttatttttttggtagataaatatattttatgttttaggttttttttttttttttttagaaattttatttagttttataaaaataattatttttgttttgtaattttttggaagttagatgaggggttgagggaggtgagtattgagttttgagttttgatttttaggttttattttatagttttatagatgtttgttggggattgggattattttgtatagtaatgggagttttatgttataggaattgagagttggtatggattagtttgaatttttagttttaattggggggaaattgaggttagagagagaagggaatatgttttaattttggatagagtatagttttttagtttttggtttgttttttatttttttttttgtggttttaggttttatttttagggagagaggtaggggtagaaggaatttaggggttttatatgattaaggtgttttgttttgtttattttgtggggggtaggattagtttttgaggatgagggagtgaggatgtggtttgggggtagttttttagtattgagttagtttttggttttttaggggaagtggtagaaggtttagtttttatggtgataagtaagggtttagttttgtttatttttagttgtttattgagattaagtgagtaggtagagatagaggtggtatagggtgtgtgaagattattaggttaagagttgggagttttggttttggtttttgttttttttaggattttagatgatttattttatttttggagttttatttataaatagggagagtggggtagttgagggtttttttttttttgtttattagtagttaggattgtttttgaggatttggggaggggaggagagggggagggtgtgtttgtgttagagatggaaggaatttaggggagtgttgtttttggttttttaaggaagaaggaagtaagttttttaatttgttttgagttagtttgttttaaattttgaggttgggttttttatttagataataaagaaaaattttttgaagttttgtagttttatttaattggttagaataataagtatagtttttttagagtttgagttttaagattttaagtttaggttgtttatgtttattttttgttattttgtagtatttttatttggtgttggttttagtttagggtagtagggagtttattgtttttaggatagtagaattatttatttttagatttagtttatgtttgttttttgtaggtttggtttattgattttagttttaattttttagtgtttttttttatgatagttttgtttttgtggatattgggaggttattgttatttttttgagttttttttttttttgtagtttttattgttgttttttgggtggttttgagtttttttggtttgtgtgagatagagggtggtagggatgatatgaggagtggggttgggttttgggtaaagttagtagattgttttttagggagatgattttgggttggttggagtgttagtatggtagttgaaggtttgggtgttggttagatttgattttttgtaaggtgttttttttagtaagatggttgttgaaaatagaagttttatggtttaggttgattgtttttgattaaaggaaattattgattttggttttttaagtttttattttgggtttttgtttggtatgtttttttttttagttgatttttaagatttaatgtttttttaggaagtttttttagattgtgattgttttttattttttgtttattttttttattgattgtttatgtttgttgatttgtaattttattaagttttgaatgtttagttttttttatagaatgttagttttttaggggttgggattttatgttgtttgtttttttttagtttgaggtttagtataggataggttaggtggtagagatgtagtaagaggttgttgaggaataaatgaataatttttaattaataaatattattgagtttttgttttgtttaggtatttgtgtgtatttttggtgagttgatgttttatagagtatgtgtagaaaatgttttttgagtaaatgaattaattgttttatttttttatttattggggagaaagttgggtgggatatattgaaaaagggtatgtaatgatgaatgttattatttaaggttgatagtataaatagtaaaggttattgtgggagataggagagaagaaagatttagatagattttgagtgatgtttttatgtagagagtaagggatagaaggagaagtagagatgggttttataggggtggttttagaattgaaattaaggtttagaaatttagtttaggatttgttaggaattggttttatatttattttgttattatattggggtagagaagattgttagggagtttttagtttgtttggatgttgggtaagttttttttagagttttggggtattttgtgttggtataaggttgagtagtaatagtgtttagtgtgggtttaggttatttgttaggggttggattttttatattttttttggagtagttttttgtggatttggaaaggttttatgttgatgttttttttatgatgagtttgttttagggttgaggttatggggtttaagataatgtagttttaatttgtagttttttagttttgatttggaagtaaatttttgattatttagagttattaattaagtagtgaatttatattattgagagtaatgtttgttttatggagggtgttgtgtatgtagtgtggttattatggtatttagtgttttttaaataattttaggttagtattattgttatagattgtttttgatgaagtgggaagtatttagtttaaggttgtatttttaattgggagttattgagttttttaatttttgttggaattttttttggggggatttttgtattattgggagttgttgtttttagtgttgggaatttttggttgttggattttagttggagaaatgtatgaagtggaaagttttgttttgtttttttaatttttatttatttgttttggtttaatttaatggtattattttaatttagttttatttttttaaaataggaaaatttttgagaggtttttaaaggtgattgattttttttttttttttttttttttttttttttggttgtgatttaaagaatgattttttagagttattttagggagagggtgttggtagtatttgtatgtatagatgtatatttgagggtttgtggtataagtttgttattgtgagtgggtgtggggaatatatgtgtagttgtttgtggataggtttgtggagtgtgtatgtttgtgtggttaagtgtaggtatataagtgggatgtgtgtttttgtgggtagttgtgtgtgggtgtagatttgtgtgggtgggtgtggatatgggtggtgtgggtttgtgtggagttgtgtataggtttatgtatatggtgttaaggggttttagttattttattttttatggttttgattatatttattttttttttaaatatttgttttgtgggggatatgttgtttgttttgtttttgggtgagttggttttatatattttgtggtggagtgtatatattgatgtaatttttttaaaaaaaataggttagtatgaggtttttttatgttattgaaagggtattgattaaatttattgttgtttaaatggttttgtgggggtgagggtggaggttaaagtttagttattgattatgtttttattttattttatttgatattggggtttgtttagagtttaatttgaatgtttttaatttagttttagttttaataaataatgttaaaggggtagtagtgattgggtttagattttagtatatatgtatggggtatagttgtttgtagagatagatagtgttttggtttttaaggggttgttaatttttagtagagggtggggtggaaatggtagtttttaggttagttagtggtataggttattttgtttatttatagttattaatttaagttttgaaatgtttttgaaataaggaaagtttgagaaattgttttagattagaggaggttaaggaattatgaggattaagtgtaattaatgtgttttggggggaatgttggaatagtaaaaggatattgggggaagttagtgaaatttgaataaagtgtggagtgtagttaatagtaatatttaataaaaagtgggtaaaatattttagtagatattttatttaagaagatttatagggagtaaataagtatgaaatatgtttaattttattatttattatggaaatgtaaattaaaagtataatgagatattattatgtgtttattatagtgggaataagatttgatgatgttaagttatggtgatgtatggagtatttggaatttttatttattatagtgtaaatatttgggtggtgttttatttagttaaattaatattgattttatgatttagtaattttatttttaggtatttattttatagaaataatgatttattttaagaggagaggaatttaaatttataggtaaatgtttgtagtagttttatttagaattattttgaaatggagatatttttaagtgttttttgataggggaatggagatgtaagttgtggtttatttaggttatggattgattttatagtgaaaagaaagaattgttgataatgatatggatgaatttgaaaggtggttttagggtttgtaaataaagttagttttaaatttatatgaagtgtaattgtatttagttagtatatgaattttgggaaaggtaaaattatggggattttaggtaatagattattggttgttaggtgtaggaggagggggaaggtttgtttataaagggtttgtattggtgtgatggaattattttgtattttgattgtggtagtgaatatatgaatttatatatgagtgtgttaaaatttataaaagtatatattaaaaagttttttatagttgggtgtggtggtttgtgtttgtaattttagtattttgagaggtagaggtggatggtggattatttgaggttaggagtttgagattagtttggttaatatggtgaaattttatttttattaaaaatataaaaatttgttgggtatggtggtagttatttataattttagttatttgggagggtgaggtaggagaattgtttgaatatgggaggtgtagattatattgaattgagattatgttattgtattttagtttgggtaataagagtaaaattttattttaaaaaaaaaaaaaaaaaatttatagtatgttgtttttaaattttaaaaaatgtaattaaaaagaaaatataaaattgtgtttatatatataaaataaaaattaaattaaaagtttatatgtttttatttagaaattttatttttaggaatttatttaataaatgatggtaagtatttattagagagaatgtttattatgttatagtttaatatgtaggaaaattgatagtaattaaaatatttaataataggggattggttaaataaaggatgatatttttataaatggaagattttttttgatagtttttattttgtatgttgtttttttttttgagatagagttttgttttgttatttaggttggagtgtagtggtttgattttggtttattgtaattttattttttagatttaaatgattgttggattttggttttttgagtagttaggattataggtatgggttattatattttgtttatttttgtatttttagtagagatggggtttttttatgttgtttaggttggttttgaatttttggttttaaatgatttatttgttttggttttttaaagtgttgggattataggtatggattattgtgttaatattaggtatttatttgtttttttgttttttttttgtttattgttttttttttttttttttttatggagtagggaatatatttgaatatgtgtgttttgtttattttgttgtgtaatatttagtattatagttggtatgtagtagatgtttagtaaatatttgatgaataaatgaatgagatgatgttaagaaaggatagtgttttaatatatgtaaagatgtttaatttatattaaataaattttattttgattaaaaagaggaagggagtggagtatttgtttttagaaaatattataagtttttagaagtggtaatatgggtttatgggttaattttgttttttttttttttttggggggtggggtggggttggtttgaattaattttttatttgtttttttaggaataggttgaaatatttgaaagtagtgattagaattttggatggtgtatgttttgagagtgggttgggttttgtgttgtgggattatgggaagtaagagataagtattatttggagagatttagttaaattggaattttagataaatagttaatattttaaataatataagtatattttaaatatggtataagaaatatttttattttataaattatttattatttaaatgtagatttgattgagtaatttggttttgttgtttgtttgtttgttttttgttaaatttgttaattttgtatattaggtttatgtggtatttagggttttgaaggtaggattggtttttattagatttatggatttatatgttagttttttatttagtttgaggtttagagatttgtttttgttttgtagtgtattgtatgagtatttttaggtttttgtatttttgtgggtatttttttttttatttagtatgtttttttgttttttttgtttgtggttaattattatttttatttggatagttttttttgtaatttttgtgattttttttttgtattataaatgtaatttatgttttatatggaagattaaaaaaaaattaagatagattaaaagaaaattatttatatatatatatatatatatatatatataaatatatatagagaaaatattattttgtaaatttttgtgtttttttttgagatggagttttgttgttgttgtttaggttggagtgtagtggtgtatttttggtttagtgtaatttttgtttttttggtttaagttatttttttgttgtagttttttgagtagttgggattataggtatttagtattatgtttggttaatttttgtatttttagtagagatagggttttgttatgttggttaggttggttttgaatttttgattttagatgatttgtttttttgggttttttaaagtgttgggattataggtgtgagttattgtgtttagtttataaatattttagtaaaatttaattatattttgtatttttttttatgttgttttatatttttttattatattatttttaatggttatgtagtgagaataattattattttatttaatttatttttttttgttgggtttataggtttttatttgtttgaaattatagtaggtttgtgatttaaattttttaatatatgtatggtgatttttttaggagaagttttaagaattagaaatatgaagtttaattatttatatatttgagggtttttgagaaatatggttaagttgttttttagaaatatgtaatgtttttagttattatggtgtttttttttattttagagttaataatggttattatagtgtttttaaaatttttgttagtatgatggatgaaagtgagattttgttttttttttttttttttttattttttaattatggaatattttattttttgtttttttttgttgtgaatttttttttttgggtttttaaagtttagttaagggttatttttttttttttaggattttttttgttttttaaatattgaattttttgttttatagtattggtttatgggtttgttttttttttagattgtgagttggttagagtgggttttttagatgtattgttggggtttgggttttgtgtgagtaagggtttaggatatatttttggaattaatgtaaatgtttgtgtgtgtttgggttgagggagatttttttgggttttttttgtttttggtttggttggggtagttttgtaggtatagttgagggtggttagtgtgtttgtaggaaaaggttttaggttttggagttgggttttagatataggaggtttttggttttttgtatatattgtttgtgttaggaggttgttgtatggagttggaagaagggattttttaggatgaggggggttgaggaaattagttatagtgtagggtaggaaggattaaagatgattttggtagttttttggttttggataaattttttgttttttgtttgtttagtttaataatattgtatgaatttttgttagggaggggtatgagaagaggagatggaggggtatagttttgtgggaagttaagattgaagaggagtttttggttttggttgtttatttagaaggttaagtatttaggttttagggtttaatttttagtaggttaagattaagattgtagttgtgtatgttggttattaggaggtattgtagttttaataaagttattggatggaaggtgatgattttggggttttagtgtttaatgaggtttttagatgtttgtttgaagatttaggttttagttgggaggatttgttatttaagtagtaatttagttttattatgtgtttgttattattttagtattataagggataaagagatggatggggtgggttgttggttttttttgtaggggtttttttttttttagttttgggtatttttatatttttgttttattttagtttttttagaatttttatattgtggttttagtatttttattggatagatggttaaagtgaggtgttgagagaagggatttattagtgttattagtgattgagtgatagataggttgagatttgggtttttttttattttttaagtggtttttttttggagatttatggggattttttggttttttagagagggtggtgtatagtgggtgtttaggaaattgattaatttgtaaaagtttttgttttgtaaaagttttttaggatatttttgttgtttggtttagtggttttttatgtggttggtagatttgttattagtttttttgtgggttttttttgaggtaggtatttgttgaggtagggtttgttattttgttttttattgttttgtttttatatagaagtttttttagttttttttgtaatggtaggggtgagtggggaggattgttttttttttagtttagagatggagtgggttttttagagtttaggaatgaaaagggattaatgttgggtttttgtaaaaataaaaaataaataaataaattaaataaaattaggaattgggttttgtattttataaagtattagggtatttattatgttattagtagggttttagtttttttataattgttaggtttttattttatagttttagaaattgaggttagagggggtaaatgttttgttaagaattaataattgttaagaaggtttaggggtggtggtttatgtttgtaattttaatattttgggaggttgaggtgggagagttatttgattttagagttttatttagtttgggtgatagaggtagagatttgttttaaaaaaaaaagaaaagaaaagaaaagaaaataaaaaattggtaagaggtagagttgagatttgaattttatgtttggagtatgtttattgggtttttttggggtggatgttgtgggtgggattgggataggtagataggagatagggttaaggaggaagggaggaagttataggagaatggttgtttttagttgttttaagagattggtttttttgtaataatttttaaggttgtttttgattaaattgttttgttgaagattaattttattgattatttgggattttagatgtggattagtgttttgttttagggtttatatatattgaagtatttagaggtaaagaggtatatgagttatatgtttgtaatttattttttttttgtttgtttgtttttagataaagttttgttttgttgtttaggttagagtgtagtggtataattttgattaattgtaatttttgttttttgggtttaagtgattttttatgttggttaggttggttttgaatttttgattttaggtgatttattttttttgattttttaaagtgttgggattataggtatgagttattgtgtttagtttgtaatttattgttaaatgatatagttgtatattgtatgtatgtatattaatatatatataaatagagtatatgtatagagagagatatagagagagatttagagagattgaaaataatgtaaatatggtaaaatattattatttggggagttagtataaaaggtatttgggaattttttgtagtttatttataattttaagtgtaatattgtattaaaataaaaaggtttttaaaagaaaaggtatgtggattaatggaaagaaggtattttttttaggaattttttttgtgaagttggtatatgtaattatttgaataggatttggatgagtttatttggtaatttttttgttttttttttattattattattatttataattttataaggggttttgtatgttgtaataaaaattataagataaatgttaattttgggagtatatattgttttttagttttttggaagtttttatttttgtggaagttattgtgatttaattagaatatggggtttttttaagtagtttttttgagagttgtaggagattaaggttaagttattgttggaatttaaaagtttaaaaagtattttaatttttgagtttattgtaattttaattgttttatagttagtttaaatgagtaaagtttttttgtataaaaaaaagaaatggtggaaagaaagaattttaaattttgtttagtttttagtttttatggtttttttgttaaggtttgggttttttttattttttagtttgtgtttggaatttgttttttttgtttttttttttattttgtgttttgttttattgatttatttagagttttttttaggaattatggtttagtggaagagatgtatgagggataagtatggttaagtgttttagggtttttagggtaaaagttttgttttttagatatggtagggtttatagaaaggagtggttaattttggttgaaaaggttggagaaggtttttgtaatggagtggtttttgaattgggtattgttagttaaggaaggtttggtaaggtatgttgtattttatggtaaaataagatattaagatattatttttttattttaaatagggtaaattttaaattattaagttttttagataggagttttttaattagggttgattataattatgatagtaataatgtaatgttttgtatttgtgttgttttgatttatttattattttttttgattttttttagattttatgaggttagtgttggtatttttgttttatagatgagaaaattgaggtttagtgaagatgaataatttgtttaagattatatagttaggaggggtagattggatggttttatgttaagtttattgttttttaaggtggtgatgagttatttttttaatatggaggggttaggtaggttttattttgttttaagggggtattgttgagttattggggttatttttattttaaaggattagggtaaattaagttttagggtttttatgagaagtttatgtatgatttaatatttggagattattttttgatgttttttggggtgggatgggtgttttagttttagtttgggttttaagtgtttttgttagtttttttttttaaggaggttagaagttttttggttttttgttttatttttaagttttattttatggtgtgggtggttggatgagattttgtttttggtaggatttattgttagagaaatagagttttttatgtttttttttattttagtaatatgtttgtagggtttagagattttattggattagattttttttttatagttaagatgtggaggtttagagtaaggttatattgtttgataatggaagggttaggatttgaattttgtattttttgtatttagttttgtggtttgtttgtttattgttttttttaagttttttaaattatgtggttttgggtgtgttttaagatattttttatttaatttttttaagtttttgttttttttttgtagtagaaagaattttgtagttttattatttttattaagatattgtaatattatttttatttagaggttggtgagatggaggagtttagattttgtatgaggtaaaatgaaatgattgagaagtttttggggtaggataggtttgggtttggtttttggttttgttatttatttgttatattgatttatttaatagtatttttggagtattagttatgtattgggtaaagttttaggtggtgaaaatataaagtttagtaaaatatagtttttttttttaaatggtttgttttagtgataggggttatggttatagtgtagggtggtgattagggtaggggtatttagtttagttttggggtgattttagatttttgtagaggaggtgttttgaagtagtaatgttgttggagaggtttgttgaagttgtgtttagttaatgttttatataagattagggaatgttagttttttttatgaaagaaatgggagttgattaaaggagattattaaggaggtttttaagttattttgtggttttgttatagaagggtatttttggaaaagtgatttgatttttgtgtgttttagtttttttatttgtaagatgaggttgagaatatttatattttagaatggttgtgaggtttgattgaagtagagtgtaagatggtatattttttgatttatatatggtatttattttattaatgggatgttgttatgatatattaatatagttatgatttggggatgaatttggttgtggtagttgatagttagggtaatgttgtttagtttgtaattgtgttatttttatttgtttttttttttaggtgtattttttttagtttaggttttttgagtggtagtttttagaatgatatttatgaattataaatttttgttaaaagtagtttttagggttttttttaatgaagggtttattttatatatatataataaagattataaatggggtgaaatattggtaattgttgtaaaaattaaatgttaaatttatttggttatatagatttaaaaaaatttttaaagagtggatttatggtagtttttgtttttagattgtgtttttattaagggtaggggaggggtgttatgaggtagtgttattatttgttttgtttgttgttattgtttggtatttaagtatgtgttgaattgagttaattttaaataattgaatttttttttttttttttttttttttttggagatagggttttgttttgttgtttaggttgaagtgtagtggtgtgattttggtttattgtaatttttgttttttgggtttaagtgatttttttgttttagttttttgtgtagttgaggttataggtatatgttgttatatttggttttttgtgttttagtagagatagggttttatttttgttgttttggttggttttgaatttatgagtttaagtaatttgtttgttttagttttttgaagtgttaggattataggtatgagttattgtgtttggttaaataattgaattttttagtttgtagaagtagtatatgattttagaaagaatgtgttgtttttattaatattaaatttttttttttttaaatgtgttttttttttaatttttatttatgtatttatttatagagatggagttttgttttgttatttaggttggagtgtattgatgttattttggttaattgtaatttttgttttttaggtttaagttatttttttgttttagttttttgagtagttgggattattagtattggttattgtatttggttaatttttgtatttttagtagaggtggggttttattattttggttaggttggttttgaatttttgattttgagatttattttttttggttttttaaagtgttgggattataggtgtgagttattttgtttggtttaaatatatttattttaatttagagaattatttataaattgaaaaagtaataaggtttttttttttttggatgagaaagggaaagtaatggtttaattaattataagattgttttttttttttttgttgtttaggttggagtatagtggtataattatagtttattgtagttttaattttttgggtttaagtaattttttttttttagttttttgagtagttggtattatgggtatataatattatagttggttaattaaatttttttttttttttttttttttgtagagatgaggtgttattatgttgtttaggttggttttaaatttttggatttaagtaattgttttattttagttttttaaagtgttggaatataggtatgagttattatgtttagttttagtttgtattttaggaaagttattaatttttttaaagttgataagaatgggaaagattttttaatatttgttttttaaaaaatttatatttataattataaaatagttaataatttaaaatatttaaaggataattatatttaaaagttttggttggtgtttttgtataaatgattgggatttggagtagatgggtttttaggattttgtttattatatatagtaaggataaaatataaataattaatgttttagtatttataattaatatgttagttaaaaatggtttttttggttttgtatggtagtttatgtttgtaattttagtattttgggaagttaatgtgggtagattgtttgagtttaggagtttgagattagtttgggtaatatagtaagatttttatttttataaaaaaaatttttaaattagttgggtgtggtggtataagtttgtagttttagttatttaggaggttgaagtaggagaattgtttgagtttaggaggttgtggttgtagtgggttatgatttagttattgaattttagtttgggtgatagtgagattttgtttgagagaaggaaggaaggaaggaaggaaggaaggaaggaaggaaggaaggaaggaaggaaggaaggaaggaaggaagtaggtaggtagggagggagggagggagggagggaaggaaggaagaaaatggtttttttattgatttttgtttatttgaataaaataaaaaatttaaaaaagttttttttttaaaatgtatgatgtggttaggtgtagtgttttatatttgtaattttagtattttgggaggttgaggtgggtggattatttgaggttaggagtttgagattagtttggttaatatggtaaaattttattttaaaaaaagaaaaaaaaatatatatataatgtatggtgtgttttttttattaagtaaattttaatttatagtgaatgtgagataaatatattttttttttatttgttattattttttggtaggatggattttttgtaatgggatagattttttgagaggatattttgtgtagtataaaattgggttttgtggaatttttttttatggggttaaattttgggggatgtattaatatagtagagtttgggtatatatattttttgaggaggtttggtttttattgtttatttgttatatggtataagtaatatttttaaattggttttttgtttttggttttgttaatattgggttagtgaggaggttattatttgttttgtttagaagggtttgttttttttttttttatttataggagttgtttttatatattatatgggggttttgggttgggttggtttggtttttaggatggttttggagggaggagggagtggtgtttgggtggttaggggatatggttattattttagtagatgggtgaagatggtgtagtttatgtataatatgtagtgtgttgaaaattttttttagtgtattttttttattgtttatagagtttttatatgttggttaagtttgatgggtatataggtatgagggtatttaggtagtgggtatgagttttttgggtaggggaggaaaaaggttttttggttttaggagatttgggtttaatttatagtgggatagttttattttttttatttttaaattgaggatattaatattttttagtgggtttttataaaaagttttagtttaggtgtggttaagggtaatgtttattaggtgtttttttaattgtagatggggtttaggaagttggggtttaggaagggtgtagaggttgtttgatattttttgagtttgattttttgtgtttagttttgtgttgattagagaggaatatagtagaatttttgttttggggataggttgaagttttgggttaaataaatatagaaaatatatttagtagggagagagttattttttagtttatgatatatgtgtatgaggtgtagtagtttatggggaggaggggtttgaggggtttgggtggtttttgtttttttttgaagtttgtttttgttgtgttaggtagagatggtagtttttgttttttttattatttatttatgttttaaaagataatgttaattatatagtaattatagatttagtaataatttttttattttttaattttatgtattttagttaattttaattgtttgttaaggtttttggttagtttgatagagttaaggttttagtaaaattttattaattataatagttaatattgattgagtatttattatgttttaggaattgttttaagatttttatttatttatttatttatttatttatttatttatttatttagagatagagttttgttttttttgtttaggttggagtgtaatggtgtggttttggtttattgtaatttttgttttttgggtttaagtgatttttttgttttagtttttttagtagttgggattataggtgtttattattatgtttagttaattttttgtatttttagtagagatagggttttattatgttggttaggttggttttaaatttttgattttaggtaatttatttgttttggttttttaaagtgttgggattatagatgtgagtaattatatttggttttgtttttgtttattttattttatttaagttttattttattattaataggtagatatgatttttatttttattttataggtaaagaaattgaggtaaagaggttaattaatttgtttaaggttatttagttatgtgggttgaaatttgtttttaggttttgagttttatgggtttttttaaattaaaggtatttgaagtattaagtagtttgtgtagtataattgtggaatgaatagtttttatgattttttaagaattttagaaattatgttttagggtatatggttggaagattaggtttaagtaggtttttgtttagttatttaggttggggaagtttttaggaaggggagttggggatagttatttttttgtagttgtgttttttttggattttgttgtttagtttttggagttttagtttttggttgtgttatttattggatggtttagggtaggggatagggagttgtaagtgttttttttgggaatttaatagaaaatttttaaaatatgtatggggttaatagtatggagttattggatgttttttttttggagtttttttaagttttgttggaaggattttggaattattttaataaaggaagtggttttagatgtgtgtattttaggaggtgggtgtatagatttttagagtataaaagaatttttttaaaggttatgtttttatgggatggttaattgaaggggtagaggggtttttgaatatttaggggtttagttagggttaagattgtggttttagagtttttgtttttggttttgttttttatttttttttattagttttaggttttggaaaataaatgtgtttttgagttgaatttttgtgatttgttggttattggtttgtaggtaaggagatgaatggatggtttataagggtttttgtatattttgtaattttggattttatattagaagattatttaggggttagatagataaatgtaatagaatagagattagatgtaaatttttaaatatatgtgtaattgatttttaataaaggttttaagattggttgatgagaaaagggttattttttttataaatggtgttgggaaaagtggatatttttataaggaagaatgaagttggagagttttatgttatgttatatttaaaattaaagttattaaagatttaaatttaagagttaaattataaagtttttaaaagaagatataggtgaaaatttttttgatattggagttattgatgattttttgaatatgatattaaaagtatagataataaaataaagaaattgaaaaattgtatttttttattaaaatgtaaaatttttgtgtattaaaggatagtatttagggagtgaaaggataatttatagaatgagaagaaatatttgtaaattatgtatttgaaaaggaattaatatttagaatttttatgattgaagaataaggaaataaataattttatttaaaaatgggtaaagtatttgaatatatttttttaaaggagatatataaatggttagatgttaaaggagaatattgtatgattttatttataagaggtatttaaggttaggtgtggtggtttatatttgtaattttagtattttgggaggttgaggtgggtggattatttgaggttaggagtttaagattagtttggttaatgtggtaaaattttatttttattaaaaatataaaaattaggtaggtgtggtggtgggtgtttgtaattttagttatttgggaggttgaggtaagagaattgtttgaatttgggaggtggagattgtagtgagttgagattgtattattttattttagtttgggtaataagagtgaaattttgttttaaaaaaaaaaaaaaaaaaaaaaggtatttatagtaggaaaatttatagagagagagtagaatagaggttatttgggtggggggttaagggtgtgatggtggtttttgtttaataggtatggagtttttgtttgggatgatgaaaaagttttggaaatagtggtgatggttatataatattgtgggtgtatttaatgttattgaaaggtttatttgtagatgttaaagtggtagtattttatgttatgtatattttattataataaaaagtttatttttaattaaaataaagattttgaatgtaaaaagtaaaggttatattgaattatgtaaagaatatttagtttggggttttattgttttgtttagagttttttagtggtttttttaaagtttgaattttttggtagaaaataaatggtttaggggttaggtgtggtggtttatgtttgtaattttagtaatttgggaggttgaggtgggaggattatttgagtttaggagtttaagattagtttgggtagtatggagaaattttgtttttattaaaaatataaaagttaattgggtgtggtgatgagtttgtagttttagttatttgggaggttgaggtgggaggattatttaagtttgggaggtagaggttgtagtgagttgagattgtgttattgtattttagtttgggtgattgagtgagattttgttttaaaaaataataaaataaaataaaataaaataaaaagttttttttagttgtgtttttgttattttttagtttattttattggtatgtattatgtttttgtattttatatatttgttttatgttttttttttatttgaagatttagtttgtgttgttttttgagtttagagggttttttttattttttttagttggtgagtttttatttaatttttaaggtttattttgaatgtttatgtttaggaagttttaatttatttattttttttggggatttttatggtatgtagtatattttaattaggttatgggttttttgagggtaggagttagtttatttattgttaaatattttggtttttgtttgatatagaagtgttaggttgaaggatttgttggatgtaaggaggagtttttgttaggtgtatatttttttatgtattttttttgagttgttttttttttttgaattttggtttttatttgtaaaatggagatttaatttttttatttaggtttttggtgagatttaggggattatggatgtttaagtgtttttagattgtatatgttggggtgggatgggtggatggaattatgggtgtgttgggaagagtttaggttttggagttggatgttttgttgggaatttgggtgaggttagatggtattttggttagaagagagggttgtattttttgtaggtgagttttagaattttagggtggaggatgagtgaatgggggattaagggaggaattttagtagtttttaggtagtattttgggtaggtggtaggaatgggggtgttagtgggtaggatatggaatttattgtagggaatgggggagatttgaggaggagagttggggatgaagggagaaaattatttggttagagttgattttgggggttgtggtagttagattgtaggtttgtggttagtggggtgagatttaaaagaggagtagtgaggaaaaggggtatttttttgattgttagagttggagaagattaagatttgtgttaaatagagttatttagagttttgttgtttttatattttataggaaattttgtaaaaaaaaaaaaattaataattttttattagaatgtaagagaatgataaagtaggtttttattttaggtttttatttaaaggaaggatgaatgaagagagagtggaaagatttatagagtttttagtatgttttttttttgtaagatttttttatttatttatttagtaatagatatttattgagtatttattatatagattagttttaggttttggggaaagttggaattaaaatagataaagttttttgtggttttttatgttttttagagggtattgtttttatagatgttttttagttttattttattttgattagaggtttttttatgtttttgaaatttttggaaatttatgtagttattttttatattagttatgaggttttatgttatgtttgggatattgtttttatttggtataggtgaggaagttgtgtttaaggttatagagttaggtgtagaattttaatttgataggtgttgaaatttatttttgatattatttgttttttgtatttttggttgtgaagttgagaagaatgttttgggggttatggtttttttttttttttttttttttgtgagatggattttgttttgttatttaggttggagtgtagtggtaggattttggtttattgtaagttttgttttttgggtttatattatttttttgttttagttttttaagtagttgggattataggtgtttgttattatgtttggttaattttttgtatttttggtagagatagggttttattgtgttagttaggatggttttaattttttgattttgtgatttgtttgtttaggttttttaaaatgttgggattatgggtatgagttattgtattgtgttttgggggttatgtttgtaagattttgttttttatttttatattatttgggatggaattagggttattttaagtttaattaggattattttagaataggatgttttttaggttttttggagtttttggttagtaagatttgattttttttttttggttgttttattgtggatgagttatttattttttatgaattttagtttttatttatgaaatggggatgataatagtattaattttataggattgtgatggtgattaagtgaaattatgtataagtagtattggtgtattgtttggtgtataggtagggatgtttagttgttttgggttgttttatggttttgtagtagtagttaattttaagttttttttgttttaaaatttattattgtttttgttttgtagatgggaaaatttaggttaggagttaggtttggtattttagatttttaatttttggtagattggattagtttttttttttttttggtataatgaatggggaagagtgtggggttttgaggtattttgaggattttggagggttaatttattttttttggtgaatattatagaattttaaggtttttgaaattattgagttttatgaagaaggtttagagatggggaggttgaggttataataggggagttatgtagtagagttatgtgtatgtttgttttttttatttgaaagtgagttttttttttgaagttagaggttatggagttggagttgttttatttttatgttgggatgtgagttaggtgtgaatggatttttgtggttatatagagatattggggaggtttatatatttaggaggattttaaattttatatatatattttaaaatttgattagaattttattattattatttgtaatattttagtatttttaaagggtatagtgtgaggggtggggtagagaatttggtggtgtaggatgtatggggtagatatattatttttttttattattatattttttttatattttttttttaggtgggatagggttaaagtgttatttaatatagggagaaatggagtggtattagagaagtaagggggttgttatatatgattatttttatagaaaaattaagagaaagtatggagggagaaaaggagaaagttaagagagaagaagttttaggatttttagttattagagaaaatttattggtttggataaattttaattttttttaatttttttgtattttttttttaagtggtttttagtaagttattaaattttggtggtgtttgtatgttttagggtaagttagtttgattttttttttagagtttgagttagggttttttttattttagggtttattttattgaattggaattttaaggttatttgtttgtttttgtttttggatttgaaggtaggggttgtatttagagttttttagaatattttataaggtttggtatagtgataggtaaagtttggtgagttttgtgtaaatggaattaagttttttagttttttttgtttgtgaaataagatatgtgggttaggagatgattgttattttttttaattttgagtgagattttttaatatgttattatgatttattgtgtgtgtgttgtagggttaggggaggtattagtttttttgatgtaattaaaggtttttagggtttggtggatagttttatatagtgggaggagttggttatttggttttagttgattttggtttgtggtttttaagaatttaggaaaagaaaatttagtttggggagttgggtagagagtaggagttttagtttggtggggttgtattagagttaggtttttgtaattttattagggattttatgggtgtttttttgttgttttttaatgtttaggagtttatggtggggtttgttttatttttaaggagattgaggtagaattgtaagtatttgttttatttgatgtatagagagagtgtaatttattggatttattgtaggagttgtatttaataagagagtgggtgagtggattggattttttaatattttttgtttttttatttattgtagtggaaggaggagaatttggtgggtttttgtttttttattaatttggttgtgggggtttatttttttttgggttttagtttgtttatgtgttaaatggggttagtagtgggtatagatagtgttaaggatatgttttttttgtagtgagttatatgggatagagggtatattttagagttggtggtttgttagatggttttgttgtagtgtgggtgggttggatggattatgtttgagggttttaggatgatgtggggggtggttgggttttattggggatttgttatagggagattttgtttgttatttggtgagttagttgtttttgggagttatgattaggggtaggaaggttataggttatgatgtaagggtgtttagttattttttttgggggtgtttttggaggtagaggttatgttatttatagatttagagaagttttagagttgtgtatatgggtatttatttttgtatatttgaggtttgtatattgggggatatagatataagtgttagaggatagatatgttttttattggattatatataaatttttggttttgttttgaaatatttagatagtaggatgtggatttagagagaatgggtatggtatatattgtttatatttatgttgtgtatatgtttatataaatatttaagttggtttttgggtgtatttaattatgtgggggtaatattgtaggagatattagttttttatttatttttttagttagtgaatatttgttaagtttaattgtataaaatatttggaaggatataagttgtaatataggaggtagggatttggtatgttttattttttaggagaaggtttgtttagggaaggtgttttataaatattgggatagggaagatgagtggatataggggttatgagtttggggttttagtttgagtttggttataaagatatttgtttattttttttttatttgtattttagttttgagtttagaatttgtattttattatggttttgtaggatttttagttggttttgtgttttgtgatggttttttatttaggatttgtgttagtttttagggaagttttttttatttattttattttagttttttttggataaaaatgtgtgtgggggtgaggagggaagataaagggggtgaaggtgggtttagattgttattagtatagaaattttaagagggtttttggaaattgttaatatttttgtattttatatagttaaaatttagattttggagtagaatatatttttttaaggttatggaggagtagagaatgtaaaggtggaggttggggtgatttatattgtaattgtgggttttggtttttatgtgtgttgtgttggatattagtgttatggtttaaattttttatagttttttagttttttttgttgtggtttttagagttttggagagttagttgttttgttttgatttgggttattaggttttgtttttttatgaggtgtgtggggttaatatttatgttgggtttttagtttagaatgaaaatttatttttaaagaatttgttttaagaatttgatgaagtaagtattggttttttttttgtttttaatgtgtagtggtgttagtgtttagtagttttgattaagtggttttgagtataagtggtgtttttattgggaaagataggtatttggtagttggtggttttttttattttgtttgtattttttagtgattttttttttattaaaatggtattttgggagttgtggagtgttatggtgatttttttaattgtttttggagtttaaatttgaattggtttgtggttttgagtattattttatatattttagttttggttttttagagttttgtttttgtgtggtttttttttgttgttgagttataatttttttttatttttttttttttttggtgttggttggtgtgggttggggttaggtggagaagttgttttttgttaaggtgatagaatgtgttgggggtgggggttggggttagggttggtgtaattagggggttgttgtttttttttggatatagtggaagttttttttgtattattaaatttttgttattttttttgagggatttgtttttaggtagtatgtaagttgttgttttgggtttattttgtatttttttattgggtgaggaaggagtattttgaatggagatgggggtgtttttggtttatatatttgtagagaagaggtgtgttgggttgtatttttggaggttgtggtaattgatattagagaagattttggttgtagttgggaaggtttattggttggaaagaggtgttttttttttttagtaaagggttttgtttggaagggttgttttttatttgtttagtggtattataggatggttggtttttatttgaatttttttggatggtattattatatagttgggtttttgtagtgttggttttttaatttgatgattgttattttggtgaggatttgtgttgatggttggagaattttgtgttgtgggtgtatatggttaggtggtgtttggtaggtgatgtttgggtgtaggatggtgtttttattgttttattttaaattgttgtttgggtttaggttttttggttttttgaataggggtttggggggttaaggatgttgaggttttgggggtaggaagttttttttggttaagtgtttttttttttttttggtatatatttttttatttatttattttgtttatttttggggtgagaggtttattaaggtagggtgtgttttttttatgaattattttaaggtttttgagttgtgggggttttgggtaattatttttttttttttttggttttaggtattttagtttaggggtttgtagagaagtttgaagtttggataaatgtgttggatgttaataattttttatttttggtagtagtaaaggttaatatatttttattttttattttagtttgttattaaaataaagttgtgtgtggttgagggtaggaaggtgttgagattgagaagaagggatgttttggagaaagtgtgtttagttgattttagaaattagagttttttgggattttgttgagattttttgtagggtgttttaatttgtttttttattgtgtgttggtgttgtagtgtgtgtggtttagggtttggtgattttggtttagtttggtggttgtggtgaggtttttggtgtagttgtttggaattttgtattagaattgggattgtgtaaatgttttggttgaagtgttattttatttaagaaatattgttgttaggaataaaatggggtttttggtgttttgaagtattttttgaaatttttttaaaataatttataaaaaatgtttttgttttaatgttttataatgtttaaggaaatatgtaaatggtttgtttttttattgagatggttgttttaattaatagtgtatatatatataataatttttttaatttttttttttagagttaagtattttattatatgtaaattataataaagaaaagattgtgtaagattatgtaagttgattgatttaaaatattgagttttaatttaggttttttgtttttttatttaataatttttgtgtttggattagattggtgaagtaggttatggaaattaataaagtaaaaaattaaaagtatttttttttgttatttttttttttaaaattaaataatagttgtttttttttgagtaggttttagttttaggtttgagtttttttgtgattattttatagttatttatagtagttgttgttgtttttgttgggtttttgtttttgttttttttgggttgttttttgtatataaaatatattttagttttttaattaaatttaaatatgattttggtagaatttatatattttgtggtgtatggattgtgttggtgtaggggaaataaatattttttggtatttaattattgagtttaatttgaaaaattgggattgggtttttaggtggtattttaggggttttaatttggtttgtgtttttttagattttggtgttgagagtgttgtttttgtgggtgggtggatggagaggtaataatttgtttttaataaaaatttgttgttattgaattgaaagtgaaagggaagggagaagaggggtagttttttgtagtggttttgtgttttgggataggtagattaggattagtatgtgttggttgtagttttggtggttggatttggagtttgggggtgaggtgttggagtttttgttttgagtatagggaggttttttgtgttgttgagaaatgttggatttttaatttgatatgttttttgtggtttaggtggtttgttttggatttgggtaaggaatttaggaggttaaagagtggatttagagtttggaggggagaatggtgaagttttgggttgtaatagaagagggtttggtgggggtttttttgtaaaaatgtggtttttgtatttaaaggatattgtggagttgttttaattgttgtttttttagtatatttggggaaaggaaggtttaagttggggtagggatgtttgtagtttgggagggttttttttattaattttttttgtaatttggtttagatttggttagtagagattggaggtggtttttttgttttgtatttttttggtttggtttaggtttagttgtttggggtattttttttgttgagaggtaattggattttgttgggagtgggtttagaagttgaggtttaggaagaggtttttgagttttttttttttgttaggtgtagttatatatgtgaaagaatagtttttgttttgatttttagggttaggaatggttgttaggttttagttgtttgtttgaagatggagattagttagtgttagtattggtattaaggttgtttttgtttttgatttttttaatgtttttgggagtgtttaaggatttttttttgaattttatttttttgtttttgagtatatatatttttataattgtgggagagaattgttgttaatgtatgttttagtttttttgtttgttggtagggtagggattttattttagagtttttttttttggttatttttgttaagggtagagttttattttttgtatttttagtttttttattttagatttaatgtgtttaattttttttttagaaggattagatattttttggttggggagatttagttgttgagagagggaaagaataaatattgatttgttgtttattgtttgtggttttgttttgagtagtgtttttattttaggtagtatggagtggtgttttgttggtagttataggttgtttttggttttagtttgtagtttatgatttagagtagtggtagggatttgttttgtttttagaattgggtgtttttgagtttttagtggtttggagatagatagggatggaaatgtgggtgggggttgggaggggtaggggtagtgggggtttttgtttttgttttttgttgtttttgtagaggtatatttatgatttagtaaggtttttttgttattattttaggatgtagatgaggaaattggggtttgggaaggtgtttgttgttaggttatattgttatgggttaggggtagtagtgggttaagtggttggttttttttgttagttttaaaggttagtgtaagtagaggaagggttaggttggttgtgggggtttagtaggatatagagagagggtttaggggaggttaggtttttttgttttttttttggatttgaaggtatttaattaagaggtggggagttttttaggttttttttttgtttaatgtattagtttttttagaggttttattggtaatttttattaaaatatgaaaatttaatgtagtggagagagagtatgagttttttggttatgtaggatgaatttttatgggttttttagtttgtgatttgtttttatttaatagttttgaatgatagggatgagttggggtttgtatttttgggttgggaaggatagttagtatggatagggttgagagtttttgttggtttagtatggaaagagtgtttgtatgagagttgtgtgtgtttatgtgtggagttgtgtgtgtttgtgtgtggagttgtgtgtgtttatgtgtggagttgtgtgtgtttgtgtgtggagttgtgggtgtttgtgtgtggagttgtgggtgtttgtgtgtggagtagtgggtgtttgtgtgtggaattgtgtgtgtttgtatgtggagttgtgggtgtttgtgtgtggagttttgggggtttgtgatttgaatgtttgattttattttaattggaggtgaagaggaaggtggaggaagtggggaagggttattgaatttttttaaatttttttttagttttgttttatgggtttgggagtatgtggtttatttgaggttatatgggtatgtgtttttggggtatgattatattggtttttaaagaagatgttttttgtgtgtgtgtgtgtagagtgtaattgtagataagtatatgattgtgaatgtttgttagtagttatttatgaattagttttgtgtttgtgaaagaaggaatttgaatatgagaaaatatttgttattggttgtttttttaaagttattttagttattaaggtttttgttgtgttttagtttttgtttttaggtttagtgtttttttattagtttggattagggtaaattttttgtttttaattttttttattagggttggatttgaaggttaaggtttttgggtatgtgtttaggatttttggtttagagaaggtttttttttttttgtgtttttgtttttttttttgttttggggtttaggaattttgattttttggaagaagagaaggtttaggttattgagttgttttggttagagatgtttttgagtgttttttttttttgggtaatggtggttgtgttttggggggtttaggtttgttttttgtggttgtgtttaaggtagtttggaggttatttaggttagtttttttgggttttttgtgggtttaaattaggatttagattttttttttttgttatagttttgggttatttgggatttgggattttttgtttttttttttattttgttttaaattattgtttagaggtttgttgtttttaagaattgttgagggagaagttttaggggaattggtttgtttgtatttttattgttagtagtgtttagggttttaggatttgggttttgttagattatagtgttttttgggattttagggtttttggttttgtattgtgttgtgttagtgtgtttggattttttgtgagtttttggttaattatgttttgggttttttgtttggttttgtatttgtggtgtttttatttgtggtggtgttgtttgaggagttttttagttggtgaggagtgaggtttttgtagttttgttgttttgtagttttgtagttttgtagttttgtagttttgtagttttgtagttttgtagttttgtagttttgtagtttagtgttagagtgttgtgtggagattttttgttgttgtatgttttgggttggtaagaagtatttgttttaaattttgtttagtgggtagtgtaaagtgagtggtttggggaaatgttgaagggattgggaaaaataaattttaagttgagtttaatagttgaaatgttttgtgtttaggttggtggataagaaggagatagaatagattttttggtttttttgtagtgattgattttgtttattgattagagttattattttgtttttagtttgttaatttatattttttgtaagttattagttttaagggatgtggaagttaagtattttgtggtttttagtattaggtgatttgtatgtgtatttattgtagtagggaatttgtaaggttgtgttgtggttgttgttgtttttttggagtttgaggttgttgtttgggggtgttttgtaggtgttttgttgtaagtaaagatgtggttgtgtgggtggttggggttgtggttgttgttgttgtggttgtggttgtggtggtggttggggttgtggggttgatggttggggttggaatttgttaaaggagttttgtgttttagttttattttttaggggtgttgttaggttttgttgtttagtgttgtaatgggtttggtttttggtgtttttgaatttttgtgttttggtggtggttgataggaaagttgtgttgaatttgttgtttttgggaaatgttttaaaaggtgatgagtttttttgattttgtgatattgggttgtagtaggtgtttatggtagtggttggtgatttgtagtaagagatgtaagttttagtatttatgtttggtttgtgtaggtggtgggtggggatgtgagtgagggtgtgaggatgttattgtgtgttttggttgggagtttggggaggtgaggaggttgtggttgtgtattttttgtttggtttgtttgttttttttttttttttttatgttggttttttttttttttttttttttttttttttgttttttttttttttttttttttttttttttttttttttttttttttttttttttttttttttttttttttttttttttttttttttttttatagttagttgagggaaagaatggagggtagtaaaaagatttagatgttttggaaagttgattagattttttaaatttttttaaggttttgtagtggaaaaaaaaaataagtaaatttttttttttgttttgttttttttttttttttttttttgttttttttttttttttttttttattggtttttgtttttttttttttatttttaaggagatgttattaatttgttagtggggatttaatttggaggtgtttgagggtttttttgattttaggtggggttggggagatgttaggatttttagggtttttgaggttaggttgagaattggtggggtgttggagttttgttttagggtaaagggaaatgtaaattttaatgataggttaaaaaaaagttttttaaaataaatttaataggttttgatatttgaagttagggggattatgggtttgtggatgtaagtgagttttatggatttttgtgtgtgagtttgtgggtgttgttgtgggtttttttgttggtatttttttttaggtttttaatttttttttttatttttgtttttatgggagattaatatatatataagtttttgttgtttagtgtatggttatttgtatgttttgttaattatttttttttgttgtaagggtgttgggttgggatgtagtggaatttgtgtttttttaagttttggagaagttttgggttgggtttggttttagaagttttagagtgttgttttttgtgtttttgtttagaggttgtattgtttatgttttatgtttgtgtttaggtgaggggattttttgttaggtgaagtatagagagtggattttggagattttttgattttgtttgatagttgtgttgttatttgtttattttttggggttaggggttggggagaggggtgagattgttttttttttttttggttttattgtttttgattgtaaaatgaattgtttggttttgataggttgtggttttattattattgtgagttttaaggtttttggtattgttatagtaagggaaaaaattttgtgtgtgtagttttttgattttgttttatgataattgtgttagagattggtgtttttaattttttgatgagttaatggaggtttagagaggggtggttatttggtttaggttatatagttgggaaatagttgttgtgttttggaatttttgtttaggttagtttttttattgatttggaaggttgtgtggatagtgtagatgtagaggggaaattggtttttggttgtggaatggtttaagttgaaggagattagtgagagtagttttttttaaattgttgagaaaattgttaagtgagaatgtatttttagggagtttgggagtagggtgagaggtaaaagtgtaaggtaaaattaaagagggtttgagtattgtgaattaaggaatgtgggttagatgttaattttttgtatttaaggttttttaaagaaaaaatatatttggggggttgtgtttttgtttttaattttatttgggttaatttttatttttattttatttttttagtatttttggtttttgttttgttgttgattgtgtgattttatatttggtttttattgttggtttattttgaagtgtttgttaataaagatattttgtaaattaagttaggagtgtgtaggttttagttgttttttattttatgtttaatgggaattgtgttttattggtttgtagatttaagttatttgagagttttttatttattgagtttttgttgtgttaataatttggtaatataaggtttattatatttattttgtatatgggtagattgagatttaattaaaataattttttagttagtaaaaagtggagtgtttttgttattattttaaatgtttttgtttagtggtttttttaagtttttagaatttgttaaggtttttagtttgtgtattgtagtataggtggttttttttatttggaattttttaaatttatttttgtatttttgtttggttaatgatttagagtttagtttagagtatttttttttaggaagattttttgttttttttagtttaagttgatgtttttgtttgttttatttttgttttagattttgtggttgtttggttgtttggttatgagtgtattttaattttattagttgttttagggtagttttttatgtgtttggtattttataaatatttgtggaataaaagattaaatttggattaggtgtggtggtttatatttgtaattttagtattttaggaggttaaggaggatggattataaggttaggagattgatattattttggttaatatggtgaaattttgtttttattaaaaatataaaaattagttagatgtgatggtagatgtatgtagttttagttatttgggaggttgaggtaggagaatggtgtgaattagggaggtagagtttgtagtgagttgagtttgtgttattgtattttagtatgggtgatagggtgatagggtgagattttgttttaaaaaaaaaaataaataaataaaaataaaataaaataaagattaaatttggggttgtaggattttattattttagtgtattttaattgtttagtgtagtattaagttttgagattttttttttggttttttttagttaaggatagttggttatttatttattttttttttaaaaattaagtagtggaattaatagtgtgttggattttt

SEQ ID NO: 8 - DNA, 52626 bp, Artificial Sequence
  chemically treated genomic DNA (Homo sapiens)
gaaggtttagtatgttgttaattttgttatttgatttttgaagagggggtgggtgggtgattagttgtttttgattaagggaaattaaagaaagagttttagaatttggtgttgtattgagtagttggaatatattgaggtgatagagttttatagttttaggtttaatttttattttattttatttttatttatttatttttttttttgagatggagttttattttgttgttttgttgtttatgttggagtgtagtggtataaatttggtttattgtaagttttgtttttttggtttatgttatttttttgttttagttttttaagtagttgggattatatgtgtttgttattatgtttggttaatttttgtatttttagtagagatagggttttattgtgttagttaggatggtgttgattttttgattttgtgatttattttttttggttttttaaagtgttgggattataggtgtgagttattgtgtttggtttaggtttaattttttattttataaatatttgtggggtgttaggtatgtaggaggttgttttggggtaattagtggggttgagatatatttatagttaggtaattagataattatgagatttgggatggagatgaggtaaatggaagtgttaatttaaattaggagagatgggaagtttttttagaggaagatgttttaggttgaattttgaattattagttagataaaagtgtaggaatgagtttagggaattttaggtaggggaaattatttatgttatagtgtataggttagagattttggtaggttttaggaatttgaagaaattgttggataggagtatttaggatgatggtaggagtattttgttttttgttaattggaaaattattttggttgagttttagtttatttatatgtaaaatgggtatgataagttttgtattgttagattgttggtataataggagtttaataaataaaggatttttaagtggtttaggtttgtgggttagtgaggtgtggtttttattgggtatggagtggggggtggttggagtttgtgtgtttttggtttggtttgtggaatatttttattaatgagtattttaaggtaagttggtgatggaaattagatgtgggattgtgtggttggtggtggagtaaggattagagatattaagggggtagggtgggggtaagaattagtttagatgagattgggagtagaagtgtgattttttaggtatattttttttttgggagattttagatgtagaaagttgatatttgatttatattttttggtttatggtgtttaggttttttttaattttattttgtatttttattttttattttatttttagattttttagaggtatgtttttgtttaatgatttttttagtggtttaaggaaggttgtttttgttggttttttttaatttgaattattttatagttgggggttagttttttttttgtatttatgttgtttgtatggttttttaggttggtggagggattagtttgagtagaggttttagggtgtgatggttattttttagttgtgtgatttggattaggtggttgtttttttttgagtttttgttagtttattagaaaattgggggtgttaatttttagtatggttgttatgaagtgaaattgaggggttgtatgtgtaaagtttttttttttgttgtggtggtgttaggggttttgaggtttgtagtggtggtgaaattataatttattaaaattaagtagtttgttttatagttgggggtagtgaggttagaaagggaagagatggttttatttttttttttgatttttgattttaaggagtgaataggtgatagtgtgattattgggtaaggttagggggtttttagagtttgttttttgtattttgtttggtaggaaatttttttgtttgggtgtagatgtggggtgtgaatggtgtggtttttagatgggagtgtagagggtagtgttttaaagtttttgaagttgggtttagtttagggtttttttagggtttgagggagtatagattttgttatattttagtttagtgtttttatagtagagggaaatagttaataagatgtgtaagtgattatgtattggatgatgaaggtttgtgtgtgtgttaattttttgtaggaatgggaatggggaggaaggttggaaatttaggaaaaggtgttagtgggaaggtttgtagtggtgtttgtgagtttgtgtgtaggagtttgtaggatttgtttgtatttgtaggtttgtggtttttttggttttgaatgttaaaatttgttaggtttattttggggggtttttttttaatttgttattaaaatttgtatttttttttgttttaaggtaaagttttgatattttgttaatttttagtttagttttgggagttttggggattttggtatttttttagttttgtttagaattggaaaagtttttgggtgtttttgggttgaatttttgttagtgagttagtagtatttttttaagagtggagaggagggggtaggggttagtggaaggagagaggaggaggggatgagagagggggaaaggaagaagtaaggtagggaaaaaaatttatttattttttttttttgttgtaaaattttaagagggtttgggagatttggttaattttttgaaatatttgaatttttttattgttttttgtttttttttttggttagttgtggggagggaggaaagagagagagggagagagagaggaagggggggggagggaggggaagagagagagaggagggagagagaggagagagatagagaaagaagagggggagagagagagaggttggtgtggaggggaggagggagagtgagtaggttgggtaaggagtgtatagttatagtttttttgtttttttaaatttttagttaaggtgtgtggtggtgtttttgtgtttttgtttgtgtttttgtttgttgtttgtgtaagttaggtatgaatgttgagatttgtgttttttattgtgagttgttggttgttgttatggatgtttattatagtttggtgttgtagagttgggagggtttgttgttttttagggtattttttggaggtgataagtttggtataatttttttgttggttgttgttaaagtatagggatttggggatgttaagagttgggtttgttatggtgttgggtagtaggatttggtgatatttttggagagtggagttggggtgtggggtttttttaataagttttagttttagttgttgattttgtagttttagttgttgttgtagttgtagttgtagtagtagtagttgtagttttagttgtttgtgtaattgtatttttatttgtagtgaggtgtttgtaagatgtttttggatggtagttttaaattttaggaaggtagtagtggttatagtgtggttttgtaggttttttgttatggtgagtgtatgtgtgggttatttggtgttggggattatggggtgtttggtttttgtattttttgaaattggtggtttgtgggaggtatgagttggtgggttgggggtggggtggtgattttggttggtaaatgggattgattgttgtgagggagttaagggatttgttttgttttttttttgtttgttggtttaggtatggagtgttttggttgttaaatttgatttggagtttgttttttttggtttttttggtatttttttaaattgtttgttttgtgttgtttgttgggtgggatttgaagtggatgttttttattggtttagggtgtgtggtggtaaggagtttttgtgtagtgttttggtgttgggttgtggggttgtggggttgtggggttgtggggttgtggggttgtgaggttgtggggttgtggggttgtgggatagtaggattgtagaagttttgttttttgttggttgggaggttttttgggtggtgttgttgtaggtgagagtgttgtaggtgtggagttaggtgggaagtttggagtgtggttggttgaaagtttatgggaaatttaggtgtattggtgtaatatagtgtggagttagagattttagggttttaggggatattgtggtttggtaagatttgagttttgggattttgagtgttattggtagtggggatgtgggtaggttagtttttttggagttttttttttggtgatttttggaggtggtaggtttttgaataatggtttaggatagagtaggaagggagataggaagttttgagttttaggtggtttagagttgtggtaagagagaagggtttgggttttgatttgagtttatggggaatttgggggagttggtttaaatgatttttaagttgttttgaatgtagttataggaggtaggtttgggttttttagagtatagttattattgtttgggagagagagatatttaaggatgtttttagttagagtagtttagtagtttaggttttttttttttttagagaattggggtttttgaattttaaagtggaaggggaagtaaagatgtagaaagggaaaaattttttttgggttaggagttttgagtatatatttggaggttttggtttttaggtttggttttggtgggaagagttgggggtagggaatttgttttgatttaggttgatggagaggtattaggtttggggatagaggttgggatatggtggaggttttggtggttagaataattttgggaaaatagttgatggtagatatttttttgtatttaggtttttttttttataggtgtagaattagtttatagatggttgttgataaatatttatagttatatgtttgtttataattgtattttatatatatatatgtagagagtattttttttaggagttgatgtggttatattttaagaatatatgtttatgtggttttgaatgagttatatatttttaaatttataggatagaattgagagaagatttagaaagatttagtggtttttttttattttttttatttttttttttatttttagttggaatgagattaggtatttagattatagatttttaaggttttatatatagatatttatagttttatatgtaggtatatatagttttatatatagatatttattgttttatatatagatatttatagttttatatatggatatttatagttttatatatggatatatatagttttatatatggatatatatagttttatatatagatatatatagttttgtatatggatatatatagtttttatataggtattttttttgtgttaagttagtagagatttttagttttgtttgtattggttgttttttttagtttagggatgtaggttttagtttgtttttgttatttaggattattaggtgagggtaggttgtagattaggggatttatggaggtttattttgtatagttagagagtttatgttttttttttattgtattgaatttttatattttaatgaaaattattagtgagatttttgaagaggttgatatattaggtaagaagagagtttaaggagttttttattttttggttaaatgtttttaggtttagagggaaggtggagaggtttggttttttttgagttttttttttgtgttttgttgggtttttatagttagtttggttttttttttatttgtattagtttttggagttgatggaaagggttagttatttgatttgttattgtttttaatttgtggtagtgtgatttgatagtaaatatttttttaaattttggtttttttatttgtattttggggtgataatagaaaggttttattgggttataaatgtgtttttgtagagatagtaagaggtaagagtaagagtttttgttatttttgttttttttaatttttatttatatttttatttttatttatttttgagttgttgggaatttgagagtatttaattttgaggatagggtaagtttttgttattgttttgggttataaattgtaggttgggattaaaggtagtttgtaattattggtaggatgttattttatgttgtttaagatggaggtattgtttggggtaaagttataaataataaatagtaagttagtgtttgtttttttttttttttagtagttgagtttttttagttaggagatgtttggtttttttaggaaagggattaggtgtgttaggtttaagatggagaaattgaggatataaaagatgaggttttgtttttaatagaagtagttaggaggagggattttggagtgggatttttattttgttagtaagtaggaaaattgaggtatgtattgataatgatttttttttatagttgtgagagtgtatatatttaaaagtggagaaatggagtttaaggaaaaatttttagatgtttttaggagtattgggaaagttggaggtaggggtggttttggtgttagtattggtgttggttgatttttgtttttaggtaggtagttgagatttggtaattatttttagttttggaggttggggtgaaagttgtttttttatgtgtgtaattatatttaataaaagggggaagtttggaggtttttttttgggttttaatttttgggtttatttttggtagagtttaattgttttttggtaaggaaggtgttttgggtagttgagtttgggttaagttgagggagtgtggggtggggaagttgtttttagtttttgttggttgggtttggattgggttgtggaaagagttggtgagagaaatttttttgggttgtaagtgtttttattttaatttgggtttttttttttttaaatgtgttaaaagaatgatgattaaggtggttttgtagtgttttttgggtgtggagattgtgtttttatgaaagagtttttattgagtttttttttgttgtaatttaagattttattatttttttttttagattttgggtttgttttttggttttttgaattttttgtttgagtttagggtgggttgtttgggttataggagatatgttgggttggagatttgatgttttttagtgatgtagagagtttttttgtatttagggtagggattttggtgttttgtttttaaattttggatttgattgttggagttgtagttggtgtgtattggttttagtttatttgttttgagatgtggggttgttgtgggaagttgttttttttttttttttttttttgtttttgatttggtggtgataggtttttgttgaaagtagattgttatttttttgtttatttatttgtaaaagtagtgtttttagtgttaaggtttggggaggtgtgggttaggttggagtttttggggtgttgtttaggggtttagttttgattttttgaattagatttagtggttaaatattagagggtatttattttttttgtattgatataatttatgtattatgaaatgtgtaaattttgttggggttgtatttgaatttagttagagaattggggtgtgttttgtatataagagatgatttaaagaaggtagaaatgaaaatttgatagaagtagtaatagttgttgtgggtgattgtggggtgattgtaggaaaatttgagtttgggattgaagtttgtttaggaaggggtgattgttgtttaattttggagggagggatggtgaaggaagatgtttttaattttttattttgttaatttttatagtttgttttattagtttggtttaaatataaaagttgttaaatagaaaaatagagggtttggattaaaatttaatattttaagttaattgatttgtatgattttgtataattttttttttattataatttatatatagtgaagtgtttagttttgaggaggaaagttggaagaattgttatgtatgtgtatattgttagttaggatgattattttgataaagaaatagattatttatatgtttttttaaatgttgtaaaatgttaaagtaaaaatattttttgtaagttgttttaagaaaattttagaagatattttggagtattggggattttattttgtttttgatagtagtgttttttgaatagggtgatattttagttagggtatttgtgtggttttgattttaatgtgaagttttaagtggttgtgttaggaattttgttgtgattgttgggttaagttggagttattaagttttgagttgtatgtgttgtgatgttggtatgtagtaggaaaatagattaaaatgttttatagaaaattttggtgaagttttggaggattttggtttttaagattagttgggtgtattttttttgggatgttttttttttttggttttagtgtttttttgtttttagttgtgtgtagttttgttttggtggtaaattgaaataagaaatggaaatatattggtttttgttgttgttagggatgagaggttgttgatgtttggtgtgtttgtttgggttttgggtttttttgtagatttttggattggggtgtttgaggttaggagaggagggggatagttgtttggagtttttgtggtttagaggttttgggatgatttatggggggggtgtgttttgttttggtgagttttttgttttgagggtaggtgaggtgggtgggtaggggagtgtatgttggagagaagagagaatgtttaattagagagaattttttgtttttggagttttagtgtttttagttttttaaatttttgtttaggaagttgaaggatttaggtttaggtaatggtttggggtggggtggtaagagtgttgttttgtatttggatgttgtttgttaggtgttatttggttatgtgtgtttgtagtgtagggttttttggttattagtataggtttttattgaggtgatagttattggattgggaaattaatattgtgaggatttggttatgtgatgatattgtttgggggaatttgagtggaagttgattgttttgtggtgttattagataggtgagaagtagtttttttaaatagggttttttgttggaaggaggaggtatttttttttagttagtgagtttttttagttgtaattggggttttttttaatattagttattgtggtttttagaggtgtagtttggtatattttttttttgtagatgtataaattggggatatttttatttttatttaagatgttttttttttatttagtagaggggtgtggagtaaatttgggataataatttgtgtgttgtttggaagtaggttttttagaaaggatgataaaaatttggtgatgtggaagaagtttttattgtgtttaggaaagggtagtggttttttagttgtattggttttggttttggtttttatttttagtatgttttgttattttaataaagagtggtttttttatttgattttaatttgtattagttagtgttgaggaaagagaggaatggaagggagttgtggtttagtggtgaggaagagttatgtagaggtaaggttttgaggagttaaggttggggtgtgtagggtggtatttagggttgtggattggtttggatttggattttagaggtagttggaagggttattgtggtgttttgtggtttttagggtgttgttttggtgaggagggggttattgggagatatgggtggggtaagaggggttattggttgttaagtatttattttttttggtgaaggtgttgtttgtatttgggattgtttggttaaggttgttgggtattggtgttgttgtatattgggggtagagagggagttagtgtttgttttattggatttttaaagtagattttttaagagtggatttttattttgaattggaggtttagtatggatgttggttttatgtattttgtagagggataggatttggtgatttaggttagagtagaataattggttttttagggttttgaaggttataatagagaaggttgggaagttgtgggaggtttggattatgatattgatgtttagtgtggtatatgtggggattggggtttatagttgtggtgtagattattttagtttttatttttgtattttttatttttttatggttttggagaagtatgttttgttttggggtttgaattttagttgtatgaaatgtaggagtgttgataatttttaaagatttttttggagtttttgtgttggtagtagtttgggtttatttttattttttttgttttttttttttatttttatatgtatttttgtttaggagaaattggggtaaggtgggtggaaaaggtttttttggaggttaatataggttttgagtggggagttattataggatataaagttggttagaggttttatagggttatggtggaatgtaggttttgggtttaggattgggatgtaaatagggagggggtaagtaagtgtttttgtgattaggtttaagttgaggttttgggtttatggtttttgtgtttatttattttttttattttagtatttatggagtattttttttgggtggatttttttttaggaggtagaatatgttaagtttttgttttttgtgttatggtttatgtttttttaagtgttttgtatagttgggtttaataaatgtttgttggttggaagaatgaatgaagaattggtgttttttgtagtgttgtttttatatggttaagtgtatttaggagttagtttaggtgtttgtgtgagtgtgtgtatagtatgaatgtgagtggtgtgtgttgtgtttattttttttgggtttatgttttgttatttgagtgttttagggtgaggttgagggtttgtgtgtagtttggtgaaaggtatgtttgttttttggtatttgtgtttgtgttttttagtgtgtgagttttaggtgtgtaagggtgagtatttgtgtgtatggttttggagtttttttgggtttgtgggtggtatagtttttgtttttagaggtgtttttagggagaatgattaagtgtttttgtattatggtttgtggtttttttgtttttggttatggtttttaggagtagttgatttattgagtggtaggtagaatttttttgtggtaagtttttggtggggtttaattattttttgtgttattttggggtttttgaatatggtttatttagtttatttatattgtggtgaggttgtttgataagttattagttttggaatatattttttgttttgtgtggtttattgtggaagagatgtgtttttggtattgtttgtgtttattgttgattttatttagtatatgagtaaattgaggtttaaggggaaatggatttttatagttaggttagtaggagggtaggaatttattgagtttttttttttttattataatgggtggaaaggtagaaagtgttggggaatttaatttatttatttgtttttttgttggatgtgatttttgtaataagtttagtaagttgtattttttttgtgtattaaatagggtagatgtttgtagttttgttttagtttttttagaagtaaagtagattttgttatgagtttttgggtattagaggatagtaggagagtatttgtggaatttttggtgggattgtagggatttgattttaatgtagttttattaggttgggatttttgttttttgtttagttttttaagttgggttttttttttttaagtttttgaaaattataagttagggttagttgaggttagatgattaattttttttattgtgtaggattgtttattaggttttgagggtttttggttatattgaggaaattggtattttttttgattttgtagtatatatataatgggttatggtgatatgttggggggttttatttaaggttggaagagatggtagttattttttggtttatatgttttattttatagataaaggggattgagaggtttgattttatttatgtaaggtttattaaattttgtttgttattatgttaagttttgtggggtattttgggaagttttggatgtagtttttgtttttaggtttagaggtagagatagataagtgattttgaaattttagtttagtgggatgggttttgagatggggaaagttttgatttaggttttgaggagaaggttaggttggtttgttttggggtgtgtaggtgttattagggtttggtagtttattggaagttatttaaggggagggtgtaggaaagttgggggaagttgggatttgtttaggttaatgagttttttttagtggttggaaattttgaggtttttttttttttgattttttttttttttttttttatgtttttttttggtttttttatggaaatagttatgtataatagtttttttatttttttagtgttattttatttttttttgtgttgaatggtattttggttttgttttatttgggaggggagtatgaggaggatgtgatgatggagagaggtagtgtgtttgttttgtatattttgtattattaggttttttgttttattttttatattatattttttgagggtgttaggatattgtaaatgatagtggtggggttttgattaggttttagagtgtgtatgtagagtttggggtttttttggatatgtgagtttttttgatgtttttatgtggttataaggatttatttatatttggtttatattttagtatggagatgggataattttagttttatggtttttgattttaaggagggagtttatttttaaatggggaagataaatatgtatatagttttattgtatggtttttttgttgtggttttagtttttttatttttgaattttttttatgggatttagtggttttagaggttttggggttttgtgatatttattaagaggggtgaattggttttttagaatttttaagatgttttaggattttatatttttttttatttattgtattaggaaagggggaaggttggtttagtttgttaaaggttaagagtttgggatgttaggtttggtttttggtttgagtttttttatttataggatagagataataatgggttttaaggtaaagaaggtttagagttggttgttgttgtagaattatgagatagtttagaataattgagtgtttttgtttgtgtgttaggtagtatattagtgttgtttatgtatgattttatttaattattattataattttatgagattggtattattattatttttattttgtggatgaaaattgaggtttatggaagataagtaatttgtttatagtgagatagttaggaaggaagagttgagttttgttggttgagggttttaagaaatttaaaaggtattttgttttagaatgattttgattagatttgagataattttaattttattttagatgatgtggagatgaaagatagggttttataaatatggtttttagggtatggtgtagtggtttatgtttgtaattttagtattttgggaggtttaggtgggtggattataaagttaggagattgagattattttggttaatatggtgaaattttgtttttattaaaaatataaaaaattagttgggtgtggtggtgggtgtttgtagttttagttatttgggagattgaggtaggagaatggtgtgaatttgggaggtggagtttgtagtgagttgagattttgttattgtattttagtttgggtgatagagtaagatttattttataaaaaaaaaaaaaaaaaaaaaaattatggtttttaaagtgttttttttagttttataattggggatgtagaagataagtagtgttaggagtaaattttggtatttgttaggttgaagttttatatttgattttgtgattttgggtatagtttttttatttgtattaggtgaaaatagtgttttaggtatggtatagggttttatagttggtatgaggaatgattgtatgagtttttagaagttttaggaatatgagagaatttttgattaaggtagggtggagttgaggagtatttgtgggaatagtgttttttaggaaatatgagagattgtaggaggttttgtttgttttgattttaattttttttagagtttggagttagtttatatagtagatgtttaataaatgtttgttgttgagtgaatgaatgaagggattttataggaggggaatatgttaggaattttgtaagtttttttattttttttttgtttattttttttttgaatggaggtttggggtgagagtttgttttgttgtttttttgtattttggtagaaaattattgatttttttttttttgtagggttttttgtggggtgtaggagtagtgaggttttgggtagttttatttagtataagttttggttttttttaattttagtagttggaggagtattttttttttttattgttttttttttgggttttattttattggttataggtttgtggtttgattgttatagtttttggggttggttttagttaaatggttttttttttttatttttaatttttttttttaggttttttttattttttatagtgagttttgtgttttgtttgttggtatttttatttttgttatttgtttagggtgttgtttgagagttgttgaggttttttttttagttttttatttatttattttttattttgggattttgagatttatttgtaagggatgtagtttttttttttggttaggatgttatttgattttatttgggtttttagtagggtatttggttttaaggtttgggttttttttagtatatttatgattttgtttatttgttttattttggtatatgtaatttgagggtatttgaatatttatggttttttgagttttattaaaggtttaggtggaggaattgaatttttattttatagatggaagttaaagtttaaagagggggaatagtttagaaggaatgtatggaggagtgtgtgtttggtaaaagtttttttttatatttaatagattttttagtttggtatttttgtgttaggtagggattagagtgtttggtagtgaatgaattggtttttgtttttagagagtttatagtttggttagaatgtgttatatgttatgggaatttttagggaaggtgaatggattggggttttttgagtatggatatttgaagtggattttgaaagttgaataggagtttattagttgaaggagatgaaagaggttttttagatttaggaaatagtataaattaagtttttgggtaagggaagaatatgaagtaagtgtgtggagtgtaggggtatgatgtatgttggtgaggtgggttgaggaatggtaggggtatagttgaagagagttttttattttattttattttattttattattttttgagataaggttttatttggttatttaggttggagtgtagtggtgtaattttagtttattgtaatttttgttttttaggtttaagtgatttttttattttagttttttaagtagttgggattataggtttgttattatgtttagttaatttttgtatttttagtagagatagggtttttttatgttgtttaggttggttttgaatttttagatttaagtgatttttttgttttagttttttaaattgttgggattataagtataagttattgtgtttggtttttgggttatttattttttattaaagggtttagattttggggaagttattggagggttttgagtaaaatagtgagattttaggttgagtgttttttgtatggtttagtatggtttttgttttttgtatttaaaatttttattttaattaagaatgaattttttattgtggtaaaatatatatagtataaaatgttattattttaatatttataagtgaattttttagtggtattaagtatatttataatattgtgtaattattattattgtttttagaatttttttattattttaaatagaaattttatatttattaaatgggaattgttattatatttttgattttttatttaagtgatttttattttattttttttttgtggatttttttattgtaggtattttttttttttttttttttttttgagatagagttttatttttgttgtttaggttggaatgaaatggtgtaattttagtttattgtaatttttattttttgggtttaagtgatttttttgttttagttttttaagtagttgggattataggtatttattattatatttgtttaatttttgtgtttttagtagagatggggttttgttatattggttaggttggttttgaatttttgattttaggtgatttatttgttttagttttttaaagtgttgggattataggtgtgagttattgtatttggttttaggtattttttataggtggaattatatagtatttttttttggtgtttggttatttgtgtattttttttggagaagtgtatttaagtattttgtttatttttgaatggggttgtttgtttttttgttttttagttataggaattttggatattaatttttttttagatatatgatttgtgaatatttttttttattttatggattgtttttttattttttggatattgttttttgatgtatagaagttttatattttgatgaagaagtataattttttaatttttttattttgttgtttgtgtttttggtgttatatttaagaaattgttaataattttagtgttaggaggatttttgtttatgtttttttttaagagttttatagtttagtttttaggtttaggtttttgatgattttaattttgaatatgatgtaatataaggttttttaattttatttttttttatggggatatttattttttttagtattatttgtagaaaagatggttttttttttattgattggttttgggatttttgttgaaaattaattgtgtatgtatttgagagtttatatttggtttttattttgttgtatttgtttatttggtttttgaatgattttttgatgtgaagtttaggattgtagaatgtataaggatttttgtaggttatttgtttatttttttgtttgtaggttagtgattaataggttatagaaatttagtttaaggatatatttgttttttgggatttggagttggtgagaaggggtggagggtagagttaaaggtgaggattttagagttatagttttggttttggttaggtttttggatatttgggggtttttttgtttttttagttgattattttatgaggatgtggtttttggggaaatttttttgtgttttgagggtttatatatttattttttgagatgtgtatatttgggattattttttttattaagatgattttagaatttttttagtggagtttggaggagttttaagaaggaagtatttagtggttttatgttgttggttttatgtatattttgaagattttttgttagatttttaaaagaggtatttgtaattttttgttttttattttaggttatttagtgaatggtataattaggggttggggttttagggattagatagtagagtttaaggggagtatagttgtagagaagtagttgtttttggtttttttttttaggaatttttttggtttaggtgattaaatagaggtttgtttgagtttggttttttagttatgtgttttaaggtataatttttagggtttttggaaaattatggaaattgtttattttataattgtgttatataggttgtttgatgttttagatgtttttggtttggagaagtttatgaagtttaggatttggaaatagattttagtttatatagttgagtgattttgggtaaattagttgatttttttgttttagtttttttatttgtaaagtggggataagaattatgtttatttgttagtgatagggtgaggtttaaataaggtaaaataggtaaggataaagttaggtgtggttgtttatatttgtaattttagtattttgggaggttgaggtaggtggattgtttgaggttaggagtttgagattagtttggttaatatagtgaaattttgtttttattaaaaatataaaaaattagttgggtgtggtggtgggtgtttgtaattttagttattagggaggttgaggtaggagaattatttgaatttaggaggtagaggttgtagtgagttgagattatattattgtattttagtttgggtaagaagagtgaaattttgtttttaaataaataaataaataaataaataaataaataaataggtaaggattttagaatagtttttggagtatagtaagtgtttagttaatgttagttgttatgattgataagattttgttggaattttgattttattagattggttggaaattttgataggtagttaaagttgattgggatgtatagagttggaaaatgaagaaattattattgaatttatgattattgtgtggttgatattgttttttaaaatatggatgagtgatgggaggggtgggggttgttatttttatttaatgtagtgggggtaggttttaaggagggataaaggttatttaggttttttaggttttttttttttataggttgttgtattttgtatatatgtgttatgagttggggaataattttttttttgttgaatgtgttttttgtgtttatttgatttagaattttagtttgtttttagggtaggggttttgttgtgtttttttttgattagtatagggttgagtatagagaattgggtttagggaatgttaggtaatttttgtattttttttgggttttagttttttgggttttatttgtaattaagaaagtatttggtgggtattgtttttggttatatttggattgagattttttgtggaaatttattgggagatattagtatttttaatttgaagatgaggaaggtgaggttgttttgttgtgaattgaatttagattttttgaagttaaagagtttttttttttttttgtttagggggtttatgtttattgtttggatgtttttatgtttatgtgtttattagatttgattagtatgtgagagttttgtagatggtggagggggtgtattgggaggggtttttagtatattgtatgttgtatgtgggttatattatttttgtttatttattgaaatgatgattatgttttttgattgtttagatattatttttttttttttttagagttattttgagaattaggttagtttagtttaggatttttatgtgatatgtgggagtagtttttgtgggtaaagaaggaggagataaatttttttaaatagaatgagtaatagtttttttattagtttagtgttggtgaagttaggggtaagaggttagtttggaaatattatttgtattatgtggtaggtggatagtgagggttaggtttttttagggaatgtatgtgtttaagttttgttgtattaatgtattttttaggatttagttttatgagagaagattttatagagtttagttttgtgttatataaagtatttttttaggagatttattttgttgtaggggatttattttgttaagaagtagtaataggtggaaaagagatgtatttgttttatgtttgttgtggattaaggtttgtttggtagaagggatatattatgtattatatatatatttttttttttttttttaagatggggttttgttatgttggttaggttggttttgaatttttgattttaggtgatttgtttattttagttttttaaagtgttgggattataagtgtgagatattgtatttggttatattatgtattttaaagaagagatttttttgaattttttattttgtttagatgagtagaagttaatgaaaaaattatttttttttttttttttttttttttttttttttttttttgtttgtttgttttttttttttttttttttttttttttttttttttttttttttttttttttttttttttttttttttttttttttagatagggttttattattatttaggttggaatttaatggttaaattatggtttattgtagttataattttttgggtttaagtagtttttttgttttagttttttgagtagttgggattataggtttgtgttattatgtttagttaatttaaaaattttttttatagagatgggggttttattgtgttgtttaggttggttttaaatttttgagtttaggtagtttgtttatgttggttttttaaagtgttgggattataggtatgagttattatgtggggttaaaagaattatttttaattaatatgttaattgtgaatgttgaaatattgattatttatattttatttttattatatgtgataggtaaaattttgggaatttatttattttaaattttagttatttatataaaaatattaattaaaatttttaggtataattattttttagatattttgaattgttaattattttatagttgtaaatgtggattttttaaaaagtaaatattgaagaattttttttatttttattaattttaaggaagttgatgatttttttaaagtataaattaggattgggtatggtggtttatgtttgtattttagtattttgggaggttgaggtgagataattgtttgaatttaggagtttgagattagtttgggtaatatagtgatattttgtttttataaaaaaaaaaaaaaaaaaaaaaatttaattagttagttgtgatgttgtgtgtttatagtattagttatttaggaggttgaggagggaggattgtttgagtttaggaggttgaggttgtagtgagttgtgattgtattattgtgttttagtttaggtaatagaaaaaaaaaaagtaattttataattaattgagttattatttttttttttttatttaaggggagaaaagttttgttgtttttttagtttgtaagtgattttttagattggaatgagtatatttgggttaggtgaggtggtttatatttgtaattttagtattttgggaggttgaggagggtggattttgaggttaggagtttaagattagtttggttaagatggtgaaattttatttttattaaaagtataaaaattagttaggtgtagtgattagtgttggtaattttagttatttgggaggttgaggtagaagaatggtttgaatttggggggtagaggttgtagttagttgagatggtattaatgtattttagtttgggtgatagagtgagattttgtttttataaataaatatataaataaaaattaaagaaggagtatatttgagaaagaaaagatttgatgttggtgaaagtagtatattttttttgggattatatgttgtttttgtaggttaagaaatttaattgtttggttaggtgtaatggtttatgtttgtaattttagtattttgggaggttgaggtgggtggattgtttgagtttatgagtttaagattagttgggataataagagtgaaattttgtttttattaaaatataaaaagttaggtgtggtggtatgtgtttgtagttttagttatatggaaggttgaggtaggagaattgtttgaatttagaaggtggaggttgtagtgagttgagattgtattattgtattttagtttgggtagtagagtaagattttgtttttaaaaaaagaaagaaagaaagaaagaaatttaattgtttaagattagtttaatttagtatgtatttgggtgttagatagtgataataggtagggtgagtgataatgttgttttgtaatattttttttttgtttttggtgagggtatagtttaaaggtagaggttgttgtgaatttattttttaaaagtttttttaagtttatataattaaataaatttaatatttgatttttatagtagttgttaatgttttattttatttatagtttttgttatatgtatgtgaaatgggttttttattgaaagggattttgggagttatttttgatagaggtttatggtttataaatgttattttgggagttgttgtttgggaaatttgaattggagaggatgtatttggggaaggaagtaggtgggggtgatatagttgtaggttgagtaatgttgttttggttgttagttgttatggttaaatttatttttagattataattgtgttaatatattatggtaatgttttattgatagagtgggtgttgtgtgtgggttaggggatatgttgttttgtattttattttagttagattttatagttattttgggatgtggatgtttttagttttattttatagatgaggaaattgaagtatataaaggttaagttatttttttaaggatatttttttgtggtagaattataaggtggtttgggagtttttttaataattttttttagttggtttttattttttttatggggaaaattggtattttttagttttatgtgaagtgttagttaaatatagttttaatagatttttttaataatattgttgttttaaaatattttttttatagagatttggagttgttttaaggttgggttaggtgtttttgttttggttattattttgtattgtaattatggtttttgttattgaggtgagttatttgaaggaagggattgtgttttattgggttttatatttttattatttggaattttgtttagtgtatagttggtgttttaggaatgttgttgaatgaattaatgtagtaaataagtggtagagttaggggttaagtttaggtttgttttattttaaagattttttaattattttattttgttttgtgtaggatttaagtttttttattttgttagtttttggatgaaagtgatattatagtgttttggtgaaggtggtggagttgtaggattttttttgttatagaagggaaatagaggtttgggggaattaagtgagagatgttttgggatatgtttagggttatatggtttagggggtttgagagggataatgggtagatagattatagggttggatgtaggaggtgtagggtttaagttttggtttttttattattaggtagtatgattttgttttgggtttttgtattttggttgtgaagggagggtttggtttagtggggtttttgaattttgtggatgtattgttgggataggggagagtatgggagattttgtttttttggtagtgggttttgttggggatagggttttatttaattatttatgttatgagatggagtttggggatgggatgaggagttgggaaatttttagtttttttgaggagagaagttgataggggtatttagagtttagattgaagttggaatatttattttattttaggaggtattaggaagtgatttttaagtgttagattatatatgggttttttatggagattttgaagtttggtttattttagttttttgagatagaaatgattttagtggtttagtaatgtttttttagaataaaatgaagtttgtttgatttttttatgttagaaagataatttattattattttgaaaggtagtggatttggtatgggattatttagtttgttttttttagttatgtgattttgagtaagttatttatttttattggattttagtttttttatttgtgaaatagagatattaatattgattttatgggatttggggagggttagaggagatagtgggtgggttagggtaatatgaatataaggtattatattattgttgttatggttgtaattagttttggttggagagtttttgtttaaggagtttggtaatttgggatttgttttatttggggtgaggggatggtattttggtattttgttttattataaaatgtaatatgttttgttgagttttttttgattggtaatatttaatttaagagttattttattgtagaggttttttttgatttttttaattaaaattgattgtttttttttgtgggttttgttgtgtttgggaaataagatttttgttttggggattttggaatatttgattgtgtttgttttttatgtattttttttattaggttatgatttttaagggaagttttgaatgaattagtaaggtaagatatagggtgggggagagaataggaaagataaattttagatataagttgggggatggaggggatttaggttttggtagaggggttatgggggttgagggttggataaagtttagggttttttttttttattattttttttttttatataaggaaattttatttatttggattaattgtaggatagttgaaattatagtagatttaaaaattaaagtattttttaaatttttaagttttaatagtagtttgattttggttttttatagtttttagaagagttgtttaaaggagttttatgttttaattgggttatagtggtttttatgggagtgagggtttttagagggttggggagtaatgtgtgtttttagagttggtatttgttttgtgatttttattgtaatgtataaggttttttgtagaattatgaatggtggtggtgatgaggggaaggtggggaggttgttaggtaaatttatttaggttttgtttaaatgattatatatgttagttttataagaggggtttttagggaaggtgttttttttttattagtttatatatttttttttttaaaaatttttttattttgatatagtattatatttaaagttataagtggattataaagaatttttagatgttttttatgttgattttttaaatggtgatgttttgttatatttgtattatttttaatttttttgggtttttttttgtgtttttttttgtgtatatgttttgtttatgtatgtattgatatatatgtatatgatatatagttgtattatttaatagtaagttgtaggttgggtgtagtggtttatgtttgtaattttagtattttgggaggttgaggaaggtggattatttgaggttaggagtttgagattagtttggttaatatagggaattatttgaatttgggaggtagaggttgtagttagttaagattgtgttattgtattttagtttgggtaatagagtaagattttgtttaaaaataaataaataaaaaaagagtaagttgtagatatatgatttatatgtttttttgtttttaagtattttagtgtgtgtaggttttgaaataaggtattggtttatatttgaggttttagatggttaatgaagttgatttttagtagagtagtttgattaggggtagttttgaaggttgttgtaagggggttaattttttgaggtagttgagagtagttatttttttgtgattttttttttttttttttgattttgttttttgtttgtttgttttagttttatttatagtatttattttaggagggtttagtaggtatgttttaggtatgagatttaagttttagttttgttttttattagttttttgttttttttttttttttttttttttttttttgagataggtttttgtttttgttatttaggttagatggaattttggggttaagtgatttttttattttggttttttaaaatgttgggattataggtatgaattattatttttggatttttttaatagttattgatttttagtaaggtatttattttttttggttttagtttttggggttataaaatggaaatttggtggttgtaaagaggttggaattttattggtggtataatagatgttttagtattttgtaaagtataaagtttagtttttggttttgtttagtttgtttgtttgttttttgtttttgtgagagtttagtattaatttttttttgtttttggattttgggaagtttattttatttttagattaagagaaaaatagttttttttatttatttttgttattgtaggaagaattgagagagtttttgtgtgagggtggagtagtggaggatggggtggtagattttgttttggtggatgtttgttttgggaagaatttatggggaagttggtaataagtttgttagttatatggaaagttgttgggttaaatgataggggtgttttagggagtttttgtaaggtaaaggtttttgtaagttagttagttttttgagtatttattgtgtgttattttttttggagggttaaggaatttttatgggtttttaaagggaggttatttaaggaatgaaaaagagtttaggttttagtttgtttgttatttagttattagtgatattggtgggtttttttttttggtgttttattttgattgtttgtttaatgaggatgttggggttatagtgtgggaattttgaggagattggaatgaggtaggaatgtgaaaatatttagaattaggggaggaaagatttttgtaaggaaggttagtgatttgttttatttatttttttgttttttgtagtgttggaatggtggtagatgtgtagtagggttgaattattgtttgagtggtaaatttttttagttaggatttgggtttttaaataaatgtttagaaattttattaggtattggggttttaggattattattttttgtttagtgattttattggaattgtagtgttttttggtggttagtatgtataattgtagttttgattttggtttgttgggagttgggttttggaatttgaatgtttagttttttgggtaagtagttagggttggggatttttttttagttttggttttttatagggttgtgtttttttattttttttttttatatttttttttggtaggaatttatgtaatgttgttgagttgagtaaatagaaggtaagaggtttgtttagggttagggagttgttggggttatttttggttttttttgttttgtgttgtggttggtttttttgattttttttattttgaaaggtttttttttttgattttatgtagtagttttttgatataagtagtgtgtgtaggggattaaggattttttgtgtttggagtttagttttagggtttggggtttttttttgtagatatattggttatttttagttgtgtttgtagagttgttttagttaaattagaggtagaaggagtttagaggagttttttttaatttaggtatatataggtatttgtattaattttaggggtgtgttttgagtttttatttatatgaggtttaggttttagtagtatatttgggaggtttattttgattagtttatagtttagggagggagtaggtttatgagttggtgttgtaaagtaggggatttagtgtttaagaggtaagggaggttttggaggaagaagggtggtttttggttgagttttgaaagtttaggagagggaatttatagtagaagaaaataaaaaataaaatgttttatagttaaaaaataaaaaaaaaaaaaggaaagataagattttatttttatttattgtgttggtaaagattttaaaaatattataatgattattattggttttgaagtgggaggggatattgtggtagttgaggatattatatgtttttggaagataatttggttgtgttttttagagatttttagatatgtggataattgaattttatatttttagtttttggagttttttttaagggaattgttatgtatgtattgagagatttaaattatagatttgttatgattttaaataagtagaaatttgtgagtttaatagaaaaggatggattaaataaaatagtgattgtttttgttatgtaattattaaggatggtgtggtagaagaatatagaatagtatggaaaggggtatggaatatggttagattttattaaaatgtttataggttgggtatggtggtttatgtttgtaattttagtattttgggaggtttaggaaggtagattatttgaggttaggagtttgagattagtttggttaatatggtgaaattttgtttttattaagagtataaaaattagttgggtgtggtgttgggtgtttgtaattttagttatttaggaggttgtggtaggagaatagtttgaattggggaggtggaggttgtattgagttaagagtgtattattgtattttagtttgggtgataatagtgagattttattttaaaaaaaaatataaaagtttataaagtaatgttttttttgtgtgtgtttgtgtgtgtgtgtgtatgtgtatgtgtgtgagtgatttttttttggtttgttttgatttttttttaattttttatatagaatatagattatatttgtaatgtgaaagaaaagttataaaagttatagagaaagttatttaggtgaaagtagtagttagttatagataggagaggtagagagatatgttaggtagaaggaagggtgtttgtaggagtgtggaagtttgaagatatttgtgtagtgtgttgtagagtggaagtaggtttttgaattttaagttagatggaaggttggtgtgtaagtttgtgagtttggtggggattagttttgtttttgggattttgaatgttatataagtttgatgtatagggttggtagatttagtaaaaagtaagtaagtaaataataaaattaggttatttagttaaatttgtatttgaataatgaataatttgtaggataaaagtattttttgtgttatatttgggatatatttatattgtttaaagtgttaattgtttatttaaaattttagtttaattgagtttttttaagtggtgtttgttttttgttttttataattttatagtatagagtttagtttgtttttagagtatgtattatttaggattttaattattgtttttagatattttaatttgtttttgggaaaataaatagaaaattaatttagattagttttgttttgttttttaaaaaaagaaaagaaataaaattaatttatagatttatattgttatttttggaaatttgtagtattttttgaggataaatgttttattttttttttttttttgattaaaatgagatttatttgatataaattgaatatttttgtatgtgttaaaatgttatttttttttagtattattttatttatttgtttattaaatgtttattgagtatttattgtatgttagttatgatattaggtgttatatagtagggtaaataaagtatatatgtttagatatattttttgttttatgggagggagagagagagagataataaataaggggaaaatagaagaataaataaatatttaatattggtgtggtggtttatgtttgtaattttagtattttgggagattaagatgggtggattatttgaggttaggagtttaagattagtttgggtaatatgaggaaattttgtttttattaaaaatataaaaatgagtggggtgtggtggtttatgtttgtagttttggttatttaggaggttgaggtttgataattgtttgaatttaggaggtgaggttgtagtgagttgagattgaattattgtattttagtttgggtggtaaagtgagattttgttttaaaaaaagaaataatgtgtagaataaagattattaggaaggattttttatttatggaaatattattttttatttaattaattttttattgttgaatattttgattattgttggtttttttatatattaaattatgatatgatgaatgttttttttagtgaatgtttattattatttattgagtaaatttttagaagtgagatttttgggtgaaggtatataaatttttaatttagtttttgttttatatatatgaatataattttgtattttttttttagttatattttttaaaatttgaaaataatatgttgtaaattttttttttttttttttgagatggagttttgtttttgttgtttaggttaaagtgtaatggtatgattttagtttagtgtaatttgtattttttgtgtttaagtgatttttttgttttatttttttaagtagttgggattataggtggttgttattatgtttgatgaatttttgtatttttagtagagatggggttttattgtgttggttaggttggttttaaatttttgattttaggtgatttattatttgtttttgttttttaaagtgttaagattataggtgtaagttattatgtttagttgtaaaaaattttttggtatatatttttatgagttttaatatatttatgtatagatttatgtatttattgttatagttaggatatagaatagttttattatattagtgtaagttttttgtaaataaattttttttttttttttatatttggtaattagtgatttgttgtttagagtttttgtagttttgttttttttagaatttatgtgttagttgagtgtagttgtattttatgtaaatttgagattggttttgtttatagattttaaggttattttttagatttatttatgttattgttaatagttttttttttttattgtggagttgatttatggtttggatagattatagtttgtgtttttatttttttgttaaaggatatttgggggtgtttttattttggggtgattttgaatagagttgttgtagatatttgtttatgggtttgggtttttttttttttaaaataagttattatttttgtagggtaaatatttaggagtgggattgttgggttatgaggttagtgttagtttaattagataagatattgtttaagtgtttgtattgtgatggatgggagttttgggtgttttatatattgttgtaatttggtattattaggttttatttttattgtgataggtatatagtggtattttattgtgtttttaatttgtatttttatagtgggtaatgaggttgagtatattttatgtttatttgttttttgtagatttttttgggtgaagtgtttgttagaatattttgtttattttttgttaaatattattattaattatattttatattttatttagattttattggttttttttaatgtttttttattgttttagtattttttttagaatatattgattatatttagtttttatggttttttggttttttttagtttggggtagttttttagattttttttattttgagagtattttagggtttgggttggtggttgtgggtgagtaggatggtttgtgttattggttagtttgaggattgttatttttattttattttttgttgaagattggtagttttttgagggttgggatattgtttgtttttgtaaatagttgtgttttgtgtatgtgtgttgaaatttaagtttagttattattatttttttggtattatttattgggattggagttaaattagggatatttaagttgagttttggatagattttagtgttagatgaggtggggtggggatgtgattaatggttaaattttaatttttgtttttatttttataggattgtttggatagtagtgggtttagttagtgtttttttaatagtatgaaagggttttatgttggtttgttttttttaaggagattatattggtgtgtgtattttgttatagggtgtgtggggttagtttatttgagaatagagtaagtggtatgttttttataaagtagatgtttggaggaaaaatagatgtaattaaaattatggaggataaaatgattgagattttttagtgttatatgtatgggtttgtgtatggttttatataggtttatattatttatgtttatatttatttatgtggatttgtatttatatataattgtttatggggatatatattttatttgtgtgtttgtgtttgattatataagtatgtatattttataaatttatttataagtaattatatatatgttttttatatttatttataatggtagatttgtgttataggtttttgggtgtatatttgtatatatagatgttattagtattttttttttaaaatggttttagaaggttattttttaaattatggttaaaaaaaaaaagaaagaaagaaaaaagaaaaattagttatttttggaaattttttaagggtttttttgttttaaaaaggtaaaattagattagagtgatgttattgggttgaattaggatagatgggtagaggttaagggaatgaagtaaggttttttattttatgtatttttttagttgaaatttaatagttaggggtttttagtattagaaatgatagtttttagtggtatgggggtttttttagggggagttttagtagaggttgaagggtttagtggtttttgattgagaatataattttgaattgaatgttttttattttattaaaagtagtttatggtaataatgttgatttaggattgtttgaagagtattggatattatgatggttatattgtgtgtataatattttttgtggagtaggtattgtttttagtgatgtaggtttattatttgattgatggttttaagtagttaggggtttatttttagattaagattgggaagttgtagattgggattatattgttttggattttatagttttagttttgggataaatttattatgggaggggtattagtatagagtttttttgggtttataaggagttgttttagggaggatgtgagaagtttaatttttggtgggtggtttggatttatgttgggtgttgttgttgtttagttttatgttagtatgaggtgttttaaggttttgaagaaggtttgtttagtatttaggtaaattgagagttttttggtggttttttttattttagtgtggtggtagggtgggtgtggagttagtttttggtagattttggattgggtttttggattttggttttaattttggagttgtttttatgaagtttgtttttgtttttttttttgttttttgttttttgtatggagatattgtttaaggtttgtttgggtttttttttttttttgttttttgtagtgatttttgttgtttgtgttgttagttttgaatggtggtatttgttattgtgtgtttttttttaatgtattttatttgattttttttttagtgggtaggaggatgaggtggttggtttatttatttgagagatattttttgtatatgttttatagaatattggtttattaaaggtgtatatagatatttggatagagtgagagtttagtgatgtttgttagttagaaattgtttatttattttttagtaattttttattgtatttttgttatttgatttattttgtgttgagttttaggttgagaagggataaatggtatgaggttttagtttttggggaattgatattttataggaggagttggatatttggggtttgatgagattatgagttagtaaatataggtagttagtggagagggtgagtagaggatggaaaatagttataatttgggagggttttttggaggagtattggattttggaggttagttggaaggaggaatatgttaggtaggggtttgagatggggatttgggggattaaggttagtggttttttttggttaggagtagttagtttgagttatgggatttttatttttagtagttgttttgttgaggagggtattttgtggggagttagatttgattagtatttaggtttttagttattatgttgatattttagttagtttggggttatttttttggagagtaatttgttggttttgtttagggtttagttttattttttatattatttttgttattttttgttttatataggttggagaaatttagggttatttgaggaatagtagtgggaattgtagaaggaagggagatttagaggggtggtagtagttttttaatgtttgtagggatagggttgttatggggaagggtgttggggggttagaattggaattagtgaattagatttataggagatagatatgggttgggtttaaagatgagtagttttgttgttttgggggtagtgagttttttgttattttagattggaattagtgttaggtggagatgttgtagggtggtgagaggtggatatagatagtttgagtttggggttttaggatttagattttgagagggttgtgtttgttattttgattagttgagtggagttgtagaattttagggaatttttttttgttgtttaaatgaggaatttagttttagaatttaaagtaagttgatttaagataggttagaaggtttgttttttttttttttgaggaattaggagtagtgtttttttgaattttttttatttttgatataggtatattttttttttttttttttttttttaggtttttagggatagttttggttgttggtgagtaagggaggagggatttttaattattttgttttttttatttgtaggtgagattttagagatgaaatgggttatttgaagttttgagaagagtgggggttgaggttagggtttttaatttttggtttggtggtttttgtatattttgtgttatttttatttttgtttgtttatttggttttagtgggtagttggaggtgggtaaaattggatttttatttgttattatgaagattggattttttgttattttttttgaaaggttaagagttggtttagtgttgagaggttgtttttaggttgtatttttatttttttatttttaagggttggttttgttttttataagatggatagagtaggatgttttggttatatgaggtttttgggttttttttgtttttatttttttttttgggaataaggtttaagattgtaggggagggagtagagggtaggttaggagttgagaggttgtgttttgtttggaattggggtatgtttttttttttttttggttttagtttttttttagttaaaattaggagtttaggttggtttatattaatttttagtttttgtaatatggagtttttattgttgtgtagggtggttttaatttttagtaagtgtttatggggttgtgagatggggtttggggattagagtttagggtttagtgtttattttttttagttttttatttggtttttaggaagttgtaaaatagggatggttatttttgtgaggttgggtggggtttttaaaaaaaaaaaaaaaaaatttaaaatataaaatgtatttgtttgttaggaagataaatatttttgttgaaagtttttggtttagttgttagttgtagtttgtagaatgttgttattgaagttatggttgtttgtatgtgtttgggtttatataggtgttatgtgtgatgttgttgggttggttgtgtatttttatggtgtttgtattgttagtggtttttaggagtagttttttgaagttgtttttaggtttattttgggtatttatttttatgttttttttttgatgttttggagagggaggtgagaatgttataggttaaatgttttttttagtttttttagtgtgtatagaaagttaggaatgagatgagtttgaagttttagtttttaggatttggatggagttagaagatttggattagaggtattattttgatatttaatgtttattgtttggatttatttttagaagaagaaattgtgggttagagtggttgatgtttatatttattatatgtgtttgttgtgatgattaaagtttgtgtatgtgaaaggttgtgttaaatgttttttaaatgttttattaattgtgtttgtttttttatttaataagttttttttttttaagttatagataaggaatatagtttttgaggagtttatatttatatttgtagatatttagttggttgtttttttttaggtatttgtgtatgttttgtatatgtttttgtgtttaagggtttgtatgtttggaggatttttttagggttggagttttttaatgtttatagggtttgtgggtttgtaagtttagattagaaatgtgaatattaataatggtaaaattatatagttagtatattagtttttttattttttatagttattttatgaggaagattttagaagtatttttatttttattttatagagggggaaattgaggtatatagtgggtaggtaagtttttttgagtatatagttggggagttatggttataggatttatggtggggttattaagagtttatgatttaaattaggggtttttagtttttaggttgtggattagtattgatttatggtttgttagtaattgggttgtatataggaggtgagtggtaggtgagtaagtattattgtaagttttggtttttgttagattagtggtgttattagatttttatagaggtgtgaattttattgtgaattatgtatgtgagggatttaggttgtgtgttttttaagagaatttgatgtttgatgatttgaggtggaatagttttatttttaaattatgttttattataattttttttatttatggaaaaaattattttttataaaattagtttttggtgttaaaaaggtagggattgttgttttaaattttttgttaggaggtgagtgtgtttgtttaggaagtttattaggttgtgtggtggtaaagtggttttttgttttatttttttattttagtttttatttttttttttttgatgtgtatgggttgatttgtttttgtagttttgagttaggaatgtgttggtgggtggggggtttatttgttagatgtagtggttgggagttgtgtttatgtatatttatttaggtttggggttagtgtgttggggatgaaggtgtttgggtagttttagtaaatagtgggtaggagttgtttgtaataggaaatgtggtttatgttttaattttatgtatttttaaggaagaaagattttttttttgaataataggtgagattagtgtgtagggttggggggtagggaaggaggtgttgattttttagtattggatttttggggtagagtttttatagtttttgttgaatttttggtgggattaggttaggaaaggaggggtatttttgtttgttttaattttgggttttttttattttaagttttattgggttagatatggttgttgaatgagttttttttttatttagggaggttatggtattggggttagaatttttgggttttagaaaagttttgatgtagggaatttttttagagagaggagtttagggttagtgaggtggggattaaaggttatagaggttagattggttgttttaggtttatataatattgttgttggaagggatttagtttaagatgatggtgaagaggtttagattggggaagagatttgtttaaggttatatagtaagttaatggtaagttagaattagaagttaagtttttggattttgtatttaatgagttttaagaggaaaaaggtagggggtggttatttgagtgttttattttttttttgatatttttttttttttgtttggtttaattattggtttttgattttgttttttttttttttagttaaagagagttttttgggtgagttagagttattttttgattttgatattgtggggatggatagtagttatttgagtgttaaggaggttggggtgaaggggttttaggattgggttagtttagatttttttagtttattggagaaggttgatttagagagtaataagggtaagaagtggtggaattggattatttttattagttattagttggaggagttggagaaggttttttagaagatttattatttagatgtgtatgtgtgggaatagttggttatgaggatagattttattgaggtttgtgtgtaggttagtgagggttatttgggagtgaggttggtaaagtagagtttgtttttgggtttttggttgtagttggggttttttgattgtttattaattatattatggtttttttttttttagtttattgagaatttgaaagtgggggtttttagtttgttttttatgtttttgttttaattagagtgattttgtttttattttttttaatattgggtttttgtattgtggtggggggttgtaaaggaaggagggtttttagtagaggggtaggaaggttgttgttggttgtttttgggttttatatagtgtaagagttttggtttttttatatagagaagggttatttgtttttgttttagaaggtttattttttagataggaaataggataaatatgaagataatgtttatagtattttagtgggtagaaatagagaatagtttagtttttttttttgtttagatggttgtatttttttttattttttaagttttaatttatattttttttgagaagtttttttgattattgtggttaaagtagtagtttttttattattagttaataattaaaatatttaatttagtataatatagtggaatttaatatttaatttaatttattgtaatttaatagaatataatttaatagaatttaatttaatataatataatatagtggaatttaatatatttaatttaatttagtgtaatttaatataatataatttaatagaatttaatttaatttagtataatataatggaattgaatatatttaatttaatttaatttattttaatataatataatttaatataatatattttaatggaatttaatttaatataatataatataatggaatttgatatatttaatttaatttagtgtaattgaatagaatttaatttaatttaatataatataatttaatagaatttaatttaatttaatataatataatggaatttaatatattaaatttaatgtagttttttttaatataatataatttaatataatatattttaatagaatttaatttaatataatataatataatggaatttgatatatttaatttatttaatataatttaatagaatttaatttaatttaatataatagaagtaaattagtttattttttgttatattgttttattttatttttttaaaaattttttaaattttttttgttttttttttagagatagggttttattttattatttaggttggagtgtaataagatgattatagtttattgtagttttaaatttttaggttaaagtgattattttattttaattttttaaagtgttagaattataggtatgagttattatgtttgggtttattttattttttgggtatttttgtttattttttttaaagagattgggtttttttttgttatttagtgtggagtatagtggtgtgattatggtttattgtagttttaattttgtgggtttaatggatttttttgttttagttttttgagtagttgggattataggtatatattattatgtttgggataagtttttttattttttgtagagatggggttttgttttgttgtttatgttggttttaaatttttggttttaagtaattttttattttagttttttatattgttgggattataggtatgagatattgtgtttaatttttattttgttttttttataggattgttgattggtttatgttattttatttgtttgtttttttttattaaattgtgatttttttgagattaagtattgattgtttattattgtatttttattaattagagaaagttaaatgtagagtattaagtttaaaaaataagtatttgtggattaattaatttttgtttagagagttgtatttgttttgattagtatgaatttatagtaaagaaaggattagaaagaaagaaaagatttatgagtagttaaaatataggtgataaaatttatatatttaagtttaagttttaatttaatataaaataaatgttataattagtttgtttttttaatttaaagtatgttggaaatagtaaataaaatgttgttatatagtagtttttttttttttagtgggttagaaaaattaatagttttagaataaagagaaattttttttttttttttttttttaattagtaaagtgttatgtagtttagtgggttgagttttttaatgttaggatagagatgttttaattttgtaatttttagtaggttttagggatttttgaattaatttatgaaagtatttttagtagtattgttttaaggtattagtaaaagatttattagttataattattttttgtttaagaaggtagaggtatttttaatagagtttataaattttttttttaaaatggttaatgtggaaaaggattagtggttattagtaaatatgtagttgtttagaaattgtagttattagaagtgatgttgaagagttgtatggttgagttgttgtaagttttttgagggtagtttgttattttttttttatttttttattttttgagataggattttattgtgttatttaggttggagtgtagtggtgtgattttggtttattgtggtttttattttttgggtttaagtgatttttatgttttagttttttaagtagttgtgattataggtatgtattattatatttagttaattttttttattttttggtagagatggaggttttattatgttggttaggttggttttgaatttatgattttaagtggtgtatttgttttggttttttaaagtgttgagattataggtgtgagttattatgtttagtttagattgttttttttttttttagatagagttttgttttgttgtttaggttggagtgtagtggtgtaattttggtttattgtaatttttgttttttgggtttaagtgatttttttgttttagttttttgagtagttgggattataggtgtgtattattatatttggttaatttttgtatatttaatagagatggggttttattatgttggttggttggtttttaatttttgattttaggtgatttattattttagttttttaaagtgttgggattataggtatgagttattgtatttggtaagattgttattttatttttttttagtgtttaatgaatgtttgatgaaggatgatagggtagttggggtttttttgtgaatttagaagtttttatatatttagattttatttgaatttggataattagttatttatatgattttatatgtttgagtttggataggaattttagtatttagtttgatttttagtaaatggattggggaggatttataggtgtaggtagagaaaggggtatagttggttatgggatagttttgtaggtgttgtgttggtgtgggataaatttgttttttttttgtgtagtatgtgtgtatatttgtgtttgtatatgtgggttgtatgtatgttttttaataaatatatgggagtgtttgggagtagaatttattaagtattgaaagaagaatgatgttttgagtataaaatatgaaaataaaggtgtatagagtattttttagttgttattatataattaaaatagagtgttttttgtatatatatatgtgtgtgtatatatatatatttatatttatttttaaaatggagttgaggtagtttataattaaagatttatttgtttaatttaaaaataagaataatggtatgaaatgtagaggtaatgtggtaaaaaaaaatttaggttaaggtttatggttgttattgagtataaattttaatttggagttttttggtagttaaggtagaaagggaaattttgatgtgttgtatattttattatttagtgggaggattatagaattatagaatggtagtgttggaaatgattattttatttttttatttgatagatgaggaagaagaggtttataggtgggaagttataatttgaagttaatagtagttatttagtagtagtattgtgattggaatttgggatttttgagttgtagtttagtgtttttttgattttagtttgttgtataaggatatatgttagattgtttagaggtttttttttgtataaaggtagtagggtgggtgggatttttatgtgtgttagatttttgggttgagttttaagtttggtagtgttttgggggggtaagggggtggtgatggaattttttgtttgtttttgttgtgtttgtttagggtttatatttagttggtggtaagttaggtgtttggtgtagagtggtggtggggatagggatggggtaatgggggttttaagatggattttttttgggaagaagtttagggtttggttttgttttagggggttgtaggggtttttttttgttgtttgggattttaatttttgtagttggtgtttgaagataataagatagaggtttttttgttttgggttattttgttttggttttagatgggttgtggttagtgaggtttttgttaagatagttggttttttgtatagtttggtttttgggagaggtttgtgttgagtgggtttaggttggggtggttttgaggtatgatatttagattgggagaatagtggggattttgtggttggttgtttttttggggttgtatagtggagataggtttgtggtgtagagttgggaggtataggaatgggtgtgggggttggtgtggtatttggaagggagtttttggagtttttggggtgttaggggttagaaatggatggatattttaagttttaggatttgtagatgtgagtatagaaggggttgtgaggatatttttgttgtttttaatttattggggaggatattgaggattggttaggtttatttagtttatgtttggatttgggtagaaaagttagaattgggtgtgtagggtaaggttttaggataaaggaataggagaagaaggagggaggaggtgggtagttttgtttttattggttgtttatttgttttttattatttttatttttagtttttaaataaattttttagtttgatttttttttatttttgttttaaagatggtgttagttttgttggttttttttttgtttggttatttgttttttttagataatttatattttttttttttttatatttagttttagtgagtttgtgttttatattttatttttttatatggtttttttttttattttagatttttttgttaggtgttggttatttttttttttttttggggtttttttttgtttatttttggattttttgttttagagtttgtagggatattttttatttttatagttttattatggggatttggaatttatagagatataaggagaattttaatagttatagtgataaaaagaaaaagagaagttatttttttttgtgtttttagtggttttttttttttttttagttttttttatagaaaattttgggaggttgaggaaggagtggaaagatggagttaagtttgtaggaaattaaatatgaaatgaaaataagtttttttgatttatttttttattttggttttagttttttattttaggttattgataaagagggattttattttagtagtatagagaggagattttatttgtttttggtttttagtgggtagttagggtttggattttaggaatttttggaggaaaaggggttttgggaggttagggtaggggttgagattttaaattggggagagggtttgtttttaaggaagaggtttttttttttttagttaatgtgtgtgtatatatgtatgtgtgtgtagttatattagtgggtatatttgtgtatgtatatatatgtttaggattagggaggggaaagtgagttggtataggagtggagaaatataataatgtatatttttgtttatttttattttttttatagtaatatgagatatatttttattttttttgattttttttttttagtaaaagatagtgagaaaggttaggagttgtaaagaaataaatgggaagtattttaaatatttttggattgtattttttatttattttttttgttgtgattatgaggtattatttgttatgtagaaattgaggtttttggtaatattagtgtttttatgagtttgtttattggttagttatattggatgtttaaagaggttaggtagtgtttgtgaggaagtatgtttatattttttttttttttttttgtagtggtttttaggaagtttaaaggttttgaggtagaggaattttgagagttgatttttatatttagtttagtagttgtattggttgtgatggatggagaaatgtttttatttggagagtagggattggattttaggaaagttggtttttttgatgtttgggtttggaagggtttggtaaggttttttatggttttgtagttgaggttattgttatggttttgtttttttggtttgtagtgtgttgtttgaggtgtgtttatttgtatttgagtttgtaaagttagtagataagtgtatattaagttggtagaggtttttttttgaggagtattatggtttatttttgaattagtttaaagttatttttggtttggaagttgatttttttttatttttttttttttatttattttgtttttattattttttttttagattttaagttatgggttaggggtagggtagtttttgtttttgagttttgggaaagtttttagttttttagaaatgtttgtgtaaaggaaaaggatttaatattttttgttattaaaaattttagtgtttatagttgatttagagatttttttttttttgttgggtttttaattaggttaatattttatttatttgtgtttagtgatgggttggtttttatttttttttattattaggttatgtttttatataagattttatagtaattgtttttatagatagtattaagggaaaaattttttatttggtagttaaggttttttgtgatttgattttgttttttttttttttattgttttttttaaattgatttttttaggtttttggagtatgttttgttgtttttaaatttaggttttggtttttttttttttagttaattatttaaggtttagtttttgttttttttttaggaagttttttttgattgtttttgttgtttagtagagtttttgttttttttttaatataggggagttttgagttgggagattgtttttaataagaaggttgtagataggatgtagggaggaaggtattgtgaatttggattaataagttttagagagttatgaattttttggaaaattgtggtaaaattgtgtgtgattgtttaggagaatatatttggaggagtatttgtagtttttattagtttttttataggagtttgtttagatgattgttaagatgattagtgatttgttttataggtggtgatatttggttgttttagatttttaagtttagaaaaataaaagttttggtttaggattatgtttatggttagtgggggtaagatatttttttagtttagagtggatgattttagattgttagtttttgaggataaagattaaggttgatatttatgtgtggttgtattgttttttaaatgtattgtaattgatggggggtttaagggaatagtttgtattgtttgaaagtgaggtttttaggtgggtattttattttggtgataatggtttttttgtgttttgtaggtttggttttagaattgaagggttaagtggaggaagtgggagtgttttgggtagatgtagtaggtttgaatttatttttttattgtatatgagttgtttttttttatttgagttgagaattatgtttaggtaagttttgttttgagttgttgttattgatttttagtttttggtgttttgagaatgagttttttggaggagagtttaggtattttgagatgatttatggttttaggttgtttttttgttttattttaggggtgtgtttgtttatattagagtgtgggaggtttagggttaatttatttaattaattattgaattaggtttggttgaattttagggaagggaaggttggggtagtgagaatggtttttttttttattagttttggttatttttgttgtgggtattggaattaaggtaggtagaaggttattaggtttttagatattgtttggagggtttttttagaaagtgagttttgaaatttttaggatttgtggttaagttggaatgagtttgggattttgagtttggggatttaggttatttttttagttttaggttttttttattttaggtaagttttaaatttttgagttttagtttttttatttgtattttggatatggtaaaagtatttgtttagttttgttgttaggtagttgtaaggtttaaatttaattatgtaaaagtattttgtgaattgtatagttttaaaaagtttgtgtgtttgtgtttagtttttggggttttgtttttttttttttttagagtattttttttaggtgtttgttagttagttttttgttttagtgtgagatgtaagggatgagaagtattgagttatattaggtatatgggatgtttagagagatgtgtttttggttaagtttaagtttttttttgatttttatttagtttgtttagtagaagtggttgttttttatttgtttaggttttattttggtatggtttttattttagtttttaatttggttttgtttagtagttagttagtagtatgggtgtttttgttttttttatttttttttgatttggttttgtgttagtaaatggtttttggttttttaattagattagttttttgtttttttttttttagtttaggatttatggggtaggagggtagggtataggtttggaggtgaggttgaggaatatggggtgttttatataggtattattagtattagtttgtattatgtttttttatttttttttttttttttttttttttaaatttagtttttttttgtttttttaggatggaattttagttttttttttggttttgagttttgttgtttgagtgtatagttggagggagaatttaatatagggttttgtttattttttttatttttattttatttatagtattatatagtgtgtgtttagattttttttgagagggggtgatggaggttaattggtttttttttttttgtattgtagagagaaatgtggttttttttaggatgggggttgagttttttttttttgttttaaaatgttttttttgagtgtgttttagatatatgtaggagggtaggttagtagaagtttatatgaggttattaggaattttgtgtgtataagttgagaggtttttgggttttttttatattttaattttatttttttatatgtgtttagaaggtagaggaagatgggagttttaggtgaatgttggggagggaagggaagtttagtggtatagatggaagataagatggttaatttatttttgtatatgtttttgtttttttggtatgaggaggtttggttttagatttggttgtttatttttgaggtagttttttttattttgagttagttttgaagttttttagtttaggttttggaattttagttattgatttttggtttttgagaggtttaggtttttgttgtttattttatttaatttttttattttttttgttattggtgggggtttaagggaatttgtgaggttaaagttttttgagttgaggtttgtttattttgtttaggtgtttatggatgtgaggggtttggggaggagttggaggtgaatgagatatagttgttatttgtagatggaggttaagtttatagttgagtttaaaaataggaagttagttggggggtgttggggtgttatttttttattggatttttaatgaagtttgaggttattttttagaattgaatttttttttgttgttagtttggttttgggaatagagatgttaaggtgtaaaagttatttttataggggtatttggatgtttattaaggttaaatatttaagaggggttttatgggaaggatggatagtgaggggagaggtgttttgggggaaggggtgagttttttttatattatatttgtttgttagttggtgatattttttttttttttttttagatttagaatttgttttggtttggtaataatggggttgttttattagtgttagtttgtgtggttttttgtgatttggtgtttgtttgtatgtttttttatgtttatttttttggttttggggttagtagtgttattgattttttgagtgtgtttggggttggtagttatgtgggttagatgtatatgggtagtttgtttggagtagttagttttagtttaggttttaatggttatgagtttaatggtgagttggattgtaagattttgagtattgtggttttttgtatgaaggttaaggagtatagtgtggttattttttgggttatatgatagggtatttttgttttgtttttattttgggatattatgggttatgtttatgttttttaggtttttagttttttatttgattttttttttaggaatttggtttgggttaggggtttgatttttagtatttttagttgttttaagtttgaggttttgtggattgttgggagggagggggtagtaggtttttggtttttttttggtattgaggttttgatttttgtttttggttataggtagtggagaaagttaggtggttatgttttttagttttgtatttatgataagttgaaagtgtttttttgtttttgtttatttttttgttttgtttagttgattatgagttaatgttagatttttatgtagatttagtagttttattagtttagttttgtttattttttttgtttttagtggggttttttggttattaggttggtggttgtgtgtttgaagtataggttgttttgtagagttagttttttgtttttttatttttttttttttgaaagtatatggaatttgatttgttggggttaaggtgttagtttttatttttttttgaatagtgatgagtttgatagagtttggttgattgtattttggttgttttttaggttggatatatttggagagagtgggtagaggatgataggagttggagttgaggatttttgttgttatttagtaatgttagtttttaggggagatatgggttagttttttattggatattataggggaggagttagatttgagggaggttgagaatatagatgttataagggtttttatggtgttagaagaaggaaaggttttgggagagggggaggtatttgggtggggtgtgggtttgggtagtttttttgttttttggtttgtttggtatttggtatagtggggaggtttgggtagttttgttttttatttagagtttagttaggttttttttaggaggatgtggaggggtttgttttttttttgttttattttggtttttttttggggttgtttagtagtgttttggtatggaaggatttataattttggaatatataagttagagtttgggggttgggtggtagagggttaaaagttgtgtgtaggttttgttagaggatgtgtggttatgtttggtttttaggttttgttatggttttaaattgattgttttttttgttatatttgttagtgttattgttgtttagagttttttatggtagatgggggttttgtgtttttttaggtattaggaggtgttgtttttttttatatagttttttatattttgtttttatattttttttatagggattaggattttttgttttttttttagtttgtggaagggtttttggtttgggttttttggtgtggttttgttattgtaaatggggttgttaggatgtttttttgaaattaggttttttgtttttaggaagtggggttttgtgtttgtttgtttgatttttgtagtttgggtttggttttgagttttagtttttattttagttgggagtatatagtaattgtttagaggtaggtttgttagattttaggtggggggtttttttagtaggtagtgttttgtattgaagtgtttgttttttttatttttttttttgatttttgttatggagtagggttaggtttattatgtttagggttgtggatatagaaaggttttttgggttgggtggagggtaaatttggtgttgttgaatgagggtttttggggttgggggtgatagttttttgtttgtttggtgtttttatttgttttagaaattaggttgaggaagggtttggttgtggttttttttaatgagttagatttttttgtgaattgtagttttaaaatggattttatagaggtgaaagggttttggatattgaattaaatgtttttggaggtttggttttaagtgttttaaatatttgaggatttggagtgatttttgggaagttttttttagttttgaggtttgttgaaatgatttagatttttttaaaatttagttagggaaaggaagaatttaaggttgggaatagtttttttattttttttttttttttttttgaaatgtttatggttgaggaaggatggggaaggaaggaatttttattttgggttttttttatttatgagagaattaggataaagaggaggagagttaggtagttttagagtgggttaggagggagagtaagggaattaggataaagaggaggatagataggtagttttagagtaggtagggagggagagtgagagttttaagggggtttttttgtagtggtttttggtatttagtttttttatgtgtttgttttttggttgggttagatttaagttaggtaaattttaatttaaaagtttgagaagaaaaggtgtttattagaagattttgtggttatggttgtttgttttaatatatttaggaagtgtttaggattaaatatgttaatgtgaaatatttttgtttattttgttaaaggtagttatgtattttaggtttgttttttgtggtttggtttagtttttgggggttatttaattatattaagtatgataggattattgagttgggaggaagtttagaaattttttagttagtttagtttttttataatagagaagattttggtttagagtggagatatgattgttttgatttgtatttgttttgagattaggttgagagaggagtttgggatgtgttatttagggtgtgagggtttgggttttgttggtattaggggtggttggtgttgtatggagtttttttttttaatgttttatgggtatttatttagtagtttagttttttagaagagaattttggggtttagttttttttaagataggtggttaggtttaattttttgtattgtagagtagggggttattgttgtgttagtttttaggatgattgagtaagttagggtagttgtttaaggttatttggagttaaagtttatgaaggtaggtggagagaagtatttatttgttatgtggtttattgttatgtgaataagttaagagaggtgaggattttttttggatatttgtttaagattttaatagagatggtaatttaaaaataaagttgtgggtagttggtagatggatgggtagtttttttatattgatagtttttagtttttgttgggtataggttttagtatggtaaggtttgatattaaggtgttgttattgttttttagatgttagtattatttttggggtatgggagtgagggttttggggggtatatagagaggtttgtttttaaggttgaaatagtatttggaggatatgggtttttagaattttttttgaatttttttaattatatttgatttttagtgtttattattgtgtttttagttttgggaagtatggtggttaggttagtttaaagatattgtgatggggtaggtgtagtaagtgtggggtgggtttttagtatatatagttgtgattatattggatttagttttgtgttttattttttgttattttggttgggtagatgagggatgtttttatgaaaattatgtattttgtttatgtagttattttttttttgggttagatagtggggggttatttttgagaatttgaaagatatgtgggggtttttggtttgttttatggtttttattgtttagtgtaaaggtaaataggtttagttgggggaggatggttggtaaattggtttttaggataatattttgtgattatttagttaaaaaataagaaggtgataatgatttattaattttattttattttttttaggatgttgtagggaggaaaggtgtttttatgatttaattttggtttttttttttttttttttttatttatatatatagagttaggtttttatattattgattttgaaggatagtttttaatgtttaattatttgtttaggtgtgtagtggttgaaaaaagaaagttgagtgttagaaggaatatgaattttaattgttatttattgtttttattgtaagatattttaattttgtataaatgtaattttttttttagtttaatggtttggggtggaatattaaaaatatatattaaaaatatagtaaaaatttagaaaaatgtaaaaaaaaaaatgaggttggttttataaagttttattgtttatattattatgtaattatattatagtaaaatattaaaagaaatgtttttgttttttaaagtaagttattgtatttatattttttttgggagaggaggaatatggatgggaaggagatgtaggggtttaggtatggggtaaaatggagtgtagaggtagttgggtatttttagaatattttttgttggtttagtttaaattgtttggttgttgttatttgtaataaattttttttttttttttt

SEQ ID NO: 9 - DNA, 221909 bp, Artificial Sequence
  chemically treated genomic DNA (Homo sapiens)
aaaattttgtttttattaaaaatataaaaattagttggttgtggtggtgtgtgtttgtaattttagttatttgggaggttgaggtaagagaattgtttgaatttgggaggtggatgttgtagtgagttgagattatgttattgtattttagtttgggtgatagagggagattttgttttataaataaataaataaattaggtgtggtggtttatatttgtaattttagtattttgggaggttgaggtggggggattattttaggttaggagtttgagattagtttggttaatatggtgaaattttgtttttattaaaaaagaaaaaaattataaaaaaaaaaaaattagttaggtgtggtgggtatttgtaattttagttatttaagaggttgaggttggagaattatttgaatttgggaggtagaggttgtagtgagttgagattgtattattgtattttagttttggtgatgagggtaaaatttttttttaaaaaataaaaaataaaaataaataaataaaaataaaatttgaggtttaaataattaagttttgtgtatttttttaattttttttttttttttttaattttaattttatgatagattaagttttatgtattttaaaaatgtgtagaatttttatttttagtttttttttttttttttttgtttttttttttgattttttggaattggaaggaaaatttggatatttaggaattattatataggaggtatttatgtgatgtgtttaatattattttatgtaggtgtttttgggttttgggtgtttaggtttttgtgaattgtgattttaggtagaagtgtgagtatttgtagaggaatttatttatttaaagttagggaatagttagggttggtatttttagggtgattgtgttttagggtatttttgatttgtgttgagtaaaatggataaagttagtaatgtatttataatttagatttttgagatattgttggattttgggaattttaggtattaggtttgtggtagtgttattatggttaggttgggggtagtgttattatggtgtttgttggttaagttaggatatggtttaagttggaatttgttggtgttggtataagtggtgagtgggtgtgtgggtgggggttgtggttagggtgtggatattttagaatttaggatgttgtttataatttgtttatattttttgttttttttttttatagtattttttttttgaggttttttgagtttttaatttttagataaggaaaggggtggatttagttgaagtttagtgtttattttggtttaattagttttatttggggtgaggggaaatttttttggttgggttgttttttttgtagggttgtggttggatagattatttaagaaaggaagtaggtgggttggaatgaatttatggtgttatataggtttttgtttttatgtatataagttttttatatttaggtaggaaatgaaaatgttttttggatttttaaggagagtaaaggagaggggaagaggaggaggattttttggggttgttagtgatatttttagttttttgtgtatttttgggagggttgtaggagaaggtaatgttgtgtttttatttagaattagtgagtgttttttaattggttttttgttttttttttgttttttatggtttttattggtagttgtgtaagggtttggttttgtttttgtttttttatatttgttgtgatattttaggttttttaggttttgttatgttttttttttttttgggaatagttgttttttattattttggttgtttggttaatttttgtttattttttaaaattttgttttgattttgttttaataaaattttgatattattttttagttataattagttatttttttttttgtatgttggaaatattgttttattgtggagattttaaggatatttaagtagagagaatttttttgtgtaagttttgtatttttttattattgtttgtgttatttgagttgtaaagggtggttttttgtgtttgttttgttgtattgatatattgagttgtgtatggtgtttagtgtagggagaataaatgattatttgtttaatgtgtttatttataggtgaggaaattaaggttttaatttaattgatgtattttgtttttttgattattagaaaagtagtaggataggtgttttgttttgttttattttggtttattaagttggtattttggttttgatttttggttgtgtttggtgttgttgtggtgtttggtgttgttgttttgtttggtggggttgtttggagtgtttgtatttttgtttgtttttatttggttgggtttgttttgtttggatttgggattgggaagtgtggtgatttttggaattagttattggtgttagtgtggggagttgggggtgtagagttgtgggtgtggtgggttatgtaggtggtttttatttttggtttggtttggtttggtttggtttgtgttgttgtgtgggggtgtttttttttaggtttggtgtttgttagttttgttttgttaggtgtagtgtagtgtaggggtgggtgggggtggggtttggtgtgtatgtttatggggtggggagggggtgggttaggggtgggattatagttggttgggttggggttttatgtgtatttttggggaggggtggggtgggggtggggttggggtggggtttggttggtgtattttagatggtgggttgttttttttttttgtttttttattattggtttaggattagtgttttgggagtgtgtgttttgttgttttgttgttatatttttttgggagtggtggttatggaggtattatgaagaagttttatttaggtgggttttgtgtttggggtggggaggggttggtgttttgggattagtgttgtttatttgagtgtttgtggttgggagtggtgaggtgtttttggagttgagtgagtttttgtggtgggtatattgtaggttgagttttttttaggatagggttgttgttgggttgtttttgatttgagttgattgttttttgtgttgtttttagtttttgtttgagtgttggaggggttgttttgggggatgtttttttttttttgttttttgtatttttgtaggaattgttgattttttaggttggttgggtgttttgggtttttgtgtgtttgtgtgggtgaatggggttggggttaggtggaggggtgtttttgggtttagtttttagggttggtggtttaggttgtagtattttttttttggattttttttggttttttttttatttagtggggtatgggatggtttttagatgggattgtttagtagtgtttaaatttggtgatttgggtttatgttttgtgtttaggatgttgtttgtggttgatatttttattttattttagtagggtttgttttaagtaggtgaagggggtttgatttgggttttattatgagttggtttaggagtttttattttataagaggtttttgttttggtattttgaagttttattttatagatgggtatattgaggttataagggtaggttaagagaaatttagatttttattatttgtttttttttttttttttttttttttttgtggttttttttaaaggatttaggtaggtaggattttttgttttttttagtttttaaattataaatagtgtttttttttttaaatttagaaattgtttgtttaatgttttttttttaatttatttagatagaaaggtatttgttaaggatttatgaattaatttttattgataggagaatagaattatgggttttagttggaggtgaaggagttattggggttatttttttgtttttgggttattgttggttttttttggttttttatatttaggaattaaaatgagtgataaagtattttgttttaaagaggattatttagaatttttttgaaaatatttttttgggttagtagtttagaattttaatttttatttggttgttgtgaataagatggttttttatgtatttggagtatagttttgttaggagtgtgggtgggttggtgtgttggtgggtgggagtgggtttttaggtggtatatgtttggttttggtattggggttttttttttaatatgttttaaatatttgagattgttgtggggattgtgtggtgtatggttttttttaggggatttttagtttgtttagggagggttttttgtttttggttttttatattttattttttattggtgggtttagatagtgggggtgattggggtttttttaggttgtgggttttgggttttttttgtggagatttttttgtatagatgttggaagggttttgaggtaggtttggagtttttgtatttgtggtttattgggaggtggggagattattatttgtttttttttttttttttttatatatatttattttattttttattgggttttttttttttttttttttttaaaaaaaaggatagaattttttgtagtaggtggaagtagagtttgtggagtgagtaggaattaatttttgtatagtagttttggtgtttttttgtgtttatttaaaggggtaggtttttttgaggatgggggaagggagggtttagattatttttggtttgttttttgtttggtagtggtttaaggtgtgttgggttattgtgttgtagttgtatggagtgggattggagggggttgatggtgggggtggttttttgtttttattttgagtgttttggagttgttttggtattagtttttttttgggtatgggtatttgtaggagttaggttgattttttaataagttattgatattatgaaattaaggaaagtagtaaaagatgttaaaaattttttaaggttttgataatttaaggataataggaaggtttttatttttttatttagattgtgtgggattattgtttttagatttgtatgtgggttttagaataaatggaatgattataatgttgtttttggtagatttggtttgaatatttgtgagtttttgaaaaggagaaagattttagaaggatgtgttggggtaattttaagtattgtgggtttatagatagttattgaagatattttatgtgttgggtatatatggttaagtttgagtgggtatagaaatggtaatgagatatagtttttgtttgtagagaatttatatttttattgggagttaggatgagggtgagatattagtttattaatattttttttttttgagtagtttagtttttaaatattataggaatgttttggaggttttaggtggaggtgagattgagttgggttttgaggaaggagaagttttgagtagtggagaataaaaagggatttggttaggtgtgtttgaagttttagttatttaggaggttgagatatgaggattgtttgagtttaggaggttatttaggaggttgagatatgaggattgtttgagtttaggaggttatttaggaggttgagataggaggattgtttgaagttaggagtttaaggttgtagttttgtgatagtgtttggaaatagatatggtattttagtttgggtggtgttatgagattttatttgtaagaaggttttttttaatgtggaaggtagtaagggtttatatagggtagttgtaggatttagggggatattggggataggttttttttggtagttttattgttgttttaggtttttttgattgttttatttggttttttaatggggtggaggtagtggtagtttataggtagtgtggtttagtggttatatttgggggtttagagttgttagttttttgggattaaattttattaggttgtgtttttttttgtggtataaggtttttattttatgtattttatttgttttatttgtttttttgtgtgtgtggtgttttttaattttatttatttatttatttttgagatggagttttattttgttttttaggttggagtgtaatggtatgattttagtttattgtaatttttgttttttaggtttaagtgatttttttgttttagttttttgagtggttgggattgtaggaatgtgttattgtgtttagttaatttttatatttttattagagatggggttttattatgttggttaggttgattttgaatttttgattttgtgatttgtttgttttggttttttaaagtgttgtgattataggtatgagttattatgtttagtttgttttatttgttaaatgggatagtgttatgttgttgtaaaggttaaatgagtttatatttgaaaaagttgagaaatgtttgttttgtaatttgttagttgttgttatgattatgattgttattgataggaggatggagaaggttggggttatgttattgttaggatgttttagaagtttttatgatttttttttattgtggttagagtatggtgtagggttttttttttagttttttagtattggagttagttgtattgtatttgttttggttttttaggttttgagttttgggattttttttgtatattaggttatatggaatttgttgttatttttaggtttttttggaaattttttgtgggtggtagtggtaggaggatttatttgaggttgatgagttatagaagtgggattgaggttgtgttatatttttattggtatttgggaattattttggagattttttttttattttttatttttttgagatggagttttgttttgttgtttaggttggagtgtagtggtatgattttggtttattgtaatttttgttttttaggtttaagtaatttttatgttttagttttttgagtagttgggattataggtatgtgttattgtgtttagttaatttttgtattttttagtagagatggggttttattatattggttaggttggttttgaattttggattttaggtgatttatttgttttagttttttaaagtgttgggattataggtatgagttattgtgtttagttattttggagtttttttgtggtttttaggagatttttgaaggggtattagttatgattaaaaagttttatgttgttgtgatttttgagttttgggtagggagggaggttgtatttatataggaagtagtttttgttgtgatttagtgtgttggtttgttgtggtggatagggttgtatttttatttagtgttttgggagttgatttatgggaagggtaaggaattgtatttttagagaatatttttttagttagttaatttggtgataggtgagtgtgggaagggtataagtatagggtttttttttttttttttttagttttgtttttgtgtttgtttttgttgttttttgtttttttatgtttaagtttgtttgttttggtgtatttaggggatttggattggagagaaaaagttattttgtatggttagtttgtggttttgtttgatttgtgttttttgttgaggttttttagttgtgagatagttggttgagtttaagttttggggttagttttttttttagtttgttgtaaaggtagaaaggtatgtttaggtaggggttatttgttttgtttgtttatgttagattgtaggtatttgtttgttagatttttttggtttgtttagagggattttgatagttgagggtaatgtatttggtagtggagtattgtgtttgtgatagtttattttttttttggaattattttttataagtgtgattagtttaagttaggataggtatagggggatttaggattgttatttaggggtagtggtttggaatttaggtttaggtgatatgggagttaattttttgtttggagattttaggtgggtgtttgtagaggatattttatttgaggatttatggaaggggatattttttattttttatttggtttttgggttgtttttttttgatatttttttgttattttaggtagttttgatagttttatgtgattgggatttagaggtggtttttgtttttgttttagtgtttgtttataggtagtgttgtgtgggttttgaagtttgtttaagatggatttgataaggggagtttagtatatattagtgtaggtttggttagggggtgatgatggtagtttttgggtagatttagttggttttagggtaggaggggttttagagagaggttttaggtttttaggggtgtgaatttttggggtgaggtgggaagtgatgtgttgggtttttgtgtttttgtttgttggagttattattttggaaatattttagttttaggtggttgttagggatttatggggattagtgggtgttaatttttgggtgaagtttttggggtttgtatatagtatatagtgttgtggttttatggtttattttgttgtgtgaagtggtttagtttttgggagagtttttagttaggtaggtttgatggtaattgttaggttatggtgatttggaattgttgattaaagggagttagttttggtgggtggagggatttggtgggtagttattgtgatgttaggtatggggattgtgtgttatttaggtttgtgggtgttgagtttttgtgggagtagtgaagtgtttttgtggttgatgggttggttatttttgttttttttttgatgtgatagttgtgtttgggttttgggaaatttgttaggaggtttggtattggtttgttttattggagtggttttgttgagttgtgagttgtttgtttttttgaggtttttagtttattttaattttttatgtggatttggttatttattttagaagtgtttgttgggtgttgttgagtgttaggttttgtttgtttttttttttgtatgttggaggttttgggtattagttttgtagggtggtttggttttgggtttttagggtagagtatggtattttttgtttttagtttagtttttttttgttttatttttttgattttattttgggtatgggtttatttgtagtttttgtgaagggagatattgagttgttgttggtagaggaggggtggtttttgggtattgtttgttaatggttttttggtagttttgtgatagttgagttttgtttttagtttaatttgatttggttttttaaagtatgattgttggtagtttgaaaatttttaggataggaaataggagtggtgtagggaatgtaagatgattttagttttaagttattgggtggtttttagatttaggttgtttgttgtttttggtaggaatttaagttgttggttatttttagagtggtgttggtttggggtttttagtggtttttgtgtttgggtgagaggaattttggatggttattttgttttgagtgtgtgggtttttagaagtgttgggttagggggtatggagggttagaaagttttttttggagtgttggatttttttgttgatttttattttattttggtttggggttttagagaaggggtttaggtaggagtgttatttttttttaatggggatgtggttttagtttttgtttaggtgggtgtattgttttttttttggttttttttaggttgtttaaatgatttgtgatgaggtttgtgttatggttggggttttttgttttttttagtgttgtatttgggaattaggggttgggttttggaagttgaggatgtttttgaatgttatgtttgggtatttgttttggttaggtgaggtgtgttggggtagtggttgagatgggagtagtagtattgtttgttaggtttgagatgggttttgggtgagtgtggttattaggaagggttgggtagagtaggtgggtgggttgtttttggggttttgttttgtagattaatttgatttgtattttggggttggggtttttttttatagtttttttatgaattatggtttttgtttttattttaaattagattttagaagaggaataatgtttatgtaatttaagttagttggaagtgggttatatttaatttttgttattttttagtttgttaaggatttgattaatttaatttagagggatttggagggttgtttgtaaaatttattaataatagggaattttagttttgtagttatagggtttatagaggtgttgggttgttgggttattgttgggaggtgagttggtggtgtagatattatggaggtattggtagtggaagagttgtaagtgtatatagaggttggtattgaggggtggggaggaggaggtggtggattttttgttagtgttggtattatgttgtttttagtattagagatttaaggtgtggttgattttggttggggtgatgagttattggatagtagagtttttttggtagttgggggttaatgttttaattgttgggattttgtattatgttgttttttttttttgttttgtttggtttggtttggtttggtttttgagatggagttttattttgttatttaggttggagtgtggtggtttaattttggtttattgtaatttttgttttttgggtttaagtaatttttttgttttagttttttgaatagttgggattataggtatgtgttattatgtttggttaatttttgtatttttagtagagatggggttttgttatgttggttgggttggttttaaatttttgattttaggtgatttatttgttttggttttttaaagtgttgggattataggtatgagttattgtgtttagtttgtatttatgtttttttttttttttttttgagatggagttttgtttttgttgtttaggttggagtgtaaaggtgtgattttagtttattgtaatttttattttttgggtttaagtgatttttttgttttagttttttaagtagttgggattataggtttgtgttattatgtttggttaattttgtatttttagtatagatggggtgtttttatgttggttaggttggttttgaatttttgattttaggtgatttgtttgttttggttttttaaagtgttgggattataggtgtgagttattgtatttggtttatgttttttattattattatttaattttttaaggaaagtaatttaaattgtatattgtatttttttttttttttttgttttttgttgttagttttttgtattatttattgttaaataatatgaataggaaattgaaaggaaaattttaataattattggttgtagtattttttttgtgttttatttagtgtttgtttttttaggaatatgatatagggtttgatttaattatgaaaggtgtatatttttagagttttatattttttatagaatgaatgttgaattttgttttttttatttgaaattagattttaggtatggattttatgattattattataatggttttttagagtggatattgtattttgtagggaattattttttttttagttgttggtgtggatgtttttttttgatggtgtgggtttgggtttttgaagggtggtgttttgagtaaagatgttatagtagttatgtttatagttttgggtttggggttaggtggagattggttttaattttagagtttgttgttttaaaataaatttttttttttttttttttgagatggagttttgttttgttgtttaggttggagtgtagtggtgtgatttttgtttattgtaagttttgttttttgggtttatattatttttttgttttagtattttgtatagttgggattataggtatttgtttttatgtttggttaattttttgtatttttttagtagaggtggggttttattatgttagttaggatggttttaattttttgattttgtgatttatttgttttagtttttaaagtgttgggataaaataaatttttagggttgggagtggtggtttatatttgtaattttagtattttgagaggttgaggtgggtagattataaggttagaagattgagattatggtgaaattttgtttttattaaaaatataaaaaattagttgggtgtagtggtgggtgtttgtagttttagttatttgggaggttgaggtaggagaatggtatgaatttggaaggtggagtttgtagtgagttgagattgtgttagtgtattttagtttgggtgatagagtgagattttgttttataaataaataaataaataaataaataaataaatttttatatttatttgtattatttattattattattattaaatagggttttgttgtgttgtttaggttggagtgtagtggtgtgattatgattttttagttttgattttttagttttaattggttttttttttttagttttttgagtagttgggattataggtgtgtgttgtatgtttggttaattttttttttttttttttttttgagatagagttttattttgttgtttaggttggagtgttgtggtgtaattttggtttattgtaatttttggtttttggattaaagtaatttttttgttttagttttttgaatagttgtgattataggtatgtgttgttatatttggttaatttttgtatttttagtagggatggggttttattatgttggttaggttggttttaaatttttgattttgtgatttatttgttttggttttttaaagtgttgggattataggtgggagttattgtgtttggtatgtttggttaatttttaaaaaatttttgtagtagttgggtgtggtggtttatgtttgtaattttagtattttgggaggttaaggaggttgggagtttgagattagtttgattaatatggagaaattttgtttttattaaaattataaaattagttgggtatggtggtatatgtttgtaattttagttatttaggaggttgaggtaggagaattgtttgaatttaggaggtgggggttgtagtgagttgagattgtgttatggtattttagtttgggtaaagagagtgaaattttgttttaaaaaatttttgtttttgtttttgtagtgatagggttttgttttgttgttgtttaggttggtattgaatttttagttttaagtgatttttttgttttagttttttaaagtgttgggagtataggtgtgagttattgtgtttggtttttatttgttttggttgtttttttttgttttaggtaattatatatttttttaggtaattaagaaaagattgtgtatgatgagttttttttttggtatttttgggattgtttttaaaattagataagtgtttttattttgatattttattaagattttaatgaatagaatgttgtttgtttttagtttgttggtttttttgtgaaggtttagggtttttttgtttgaaaagttatttttttgttgaggtttttgatttttttttattatggtagttatgttgagggtttatagagttattttttttttattttttttttggttttttaagatgtatttgtatttttggagatgtttttttgtttttttgggttattttttttggttgttatttattttgttgatttattatttgtgtaatagttttttttggaatttttaggtttttgttatttattttttgtagtttttgttttgttttttttgttttagtttttttttttattatttttttatttgttggtttttatttttgtttatggtatatttttgtgttatattttgatggttggataaaggttgagtgaaatgtatttatttttttggtgattggggtgtttattaattagaagggatttaaggttggtgtagtttttttttgtattttggggtattgttttgtggtttttttttgttggagtttgtagttttttgtttttttttttttaaattttttgagatggagttttgttttgttgtttaggttggagtgtagtggtgagattttagtttattgtaatttttgttttttgggtttaattaatttttttgttttagttttttaagtagttgggattataggtgtttgttattatgtttggttaattttggtatttttagtagagatggggtttttttatattggttgggttggttttgaatttttgattttaggtgataggtttgtgttggttttttaaagtgttgagattatgggtatgagttattaggtttggttgttgagattatttttataagttattaggtttggttgtagttggtagtttttgattattggttttgttttatgtgatttgtgattttttttttggttttttggttttgttttgtttatttgtttattttttttatgtatgtggtttgtttatagggtatgtaatggggtttaattaggaaatggaaattgtttgagtatttatttatttatttatttatttatttatttatttattttttttaagataaggttttattttgttatgtaagttgaagtgtagtggtgtgattatagtttatggtagttttgaatttttgagtttaagtgattttttttttttagttttttaagtagtttggattataggtgtatattatatgtttgtttaatttttttttttatttttgtagagatagggttttgttttgttgtttaggttggttttgaatttttaattttaagtaatttttttgttttagttttttaaagtattggagttataggtatgtgttattatgttttgttaatttttgtattttttgtgtgtgtgtaaagataaggttttattatgttgtttaggttggttttgtatttttgggtttatgtgatttttttgtttgggttttttaaagtgttgggattataggtgggagttatagtgtttggtttatttgagtatttagaatagaaggatttaaaggtggggaattagttatatagatgatgggagaggtgaaggttagatagggaatagagaggtaattagtaggaaattaaagtggtgtgggtttatatagttttttaaaggtatggatgtaatgatttatttagaatgagaaaataaataatagtaaattataaattataagtagttgttaaatattataaatattattatatgtagaagagtattagttaattgttagttatatttttaaagttttattttttttatatttttggtattatttttttaatatgatgattttgtaatattgttttttattttgagaatagaaaattgattaggttggatatagtggtttgtgtttgtaattttagtattttgggaggttaaggtaggtggattatttgaggttaggagtttaagattggtttgggtagtgtggtgaaattttgtttttattaaaaatataaaaattagtagggtatggtggtatatatttgtagttttagttatttaggaggttgaggtgggaggattgtttgagtttaggaggttgaggttgtagtgagttgtgattatgttattgtattttagtttgggtgagagagtgagattatgttttaaaaaaaaaaaaaaaataataaaaaaaaatataggttgggtgtggtggtttatgtttgtaattttagtattgtgggaggttgagatgggtggattatttgaggttaggagtttgaaattagtttggttaatatggtgaaattttatttttattaaaaatataaaaaattagttaggtgtgatgatgtatgtttgtaattttagttatttgggaggttgaggtaggagaatggtttgaatttaggaggtagaggttgtagtgggttaagattgtgttattgtattttagtttgggtaatagagtgagattttattttaaaaataaataaataaataaagtgaatgaatttttttagttgattaaattttgtttttatttttggtagttgggatgtatataaaagtggtggttaatatggagttggtggtgttgttataattgttttgtttaagatatataggaattttggtaaattttgtttttttttttttttttaaatgtgatttttattaagaaagaagtaggaaaatgggggagatttttaattgtatatgaggtatttgtgtatgtatttttgattagagagatttttttgttttgattttatattgaaggaattgaattttttgtttataattttatttttggtgatgggagtaattttttatagatttgtttttggatttgtgtattttaaattttgtttttttttattgtgtatgtttttttggtgttaggtattgtaggatatgtttgtgttttgtgatttttgattttgtgtggtaggtggaattggaatggtgagtggagtgagtattgttggaatttgtttttatattgggatagtgagtagtaattgaattatatatggaaataaatgggaattatataaatataatttgattaaagttaaattaaatatttttttagtttaatttttttttagtaggagtttttatgtggtagtaagtttttgtttttattttatataagagaaaatgtgatgggtaggaatttaagattggaaatgaatggggatgttaattgattgtagggaaaatattttttattttgtaaattttataaaaaatgtttgattttgtggatatgtggttagggttttttttagtgttttgagagggaattatgtaggtagagggagggtttttagtattgtgggggtgatttggagattggtagtagggtgttattattatttttaggtggggatgagagggaggaagttttgtgattagagtttaggggttagagttatttgttgggagtttaaataaaggtgggattttggtaggagttggaattatatagaggattattttttttgttggagaagttgtttgaggtagaggaggtggagagtttttgtgtttttttttgtttttattttttaggttttttttaagttttttgttggttgaatttagtttaaagttagtaggtttggggatttggatatttgagttagtagaggttggtgttttttttatataaaggagggtataagaagtgggaggtatggagggggattaggttaggatttatataggatgtgtaaataggagtttttttttttttttattttaaatggtatttgtagttggttttatttttttgttgttagataggaagaggaattttgtttttggtattagttgtttttattgttttttattttatggaggttttttttttttttggtttttgtttgtaattattggtgatgttgatggattatattttttggggagtttggttatgaatatggttttttatttgttgtggattaaattgtgtttttttttttgaatttttgtgttgaagttttaatttttaatgtagttgtaattgaagatagggtttttagggaggtaattaaggttaaatgaagttatagggtaggattttaatttaataggattgatgtttttataagaagagggagagatattagagattttttttttttttttatttgtaaatagaggaaaaatgatggaggatatagtagggaggtgggtataagttaggaagaggggttttgttgggaattaattttgatggtattttgatttgggattttgggttttttaaattgagaaatatatgtttgttgtttaagttattttttttatagtaatttggatggtagtttgagtttattaaggtattgtttgtattagttagggttttttagggagatagttaataggagatggatggatggatggatggttagatagatagataagtggatagagagagagagagataggtagatatagatagataggtagataaatggttagatagataagtagatagagagatagagatagatagatataaataggtaaatagataggtagataaatggatagatagatgatagatagttaggtaggtagatagatatagataggtagatagatagatagatagatgataggttgggtttagtgatttttatttgtaataattagtatattggtaggttgaggttggtggattatttgaggttaggagtttgagattagtttggttaatagggtgaaattttatttttattaaaaatagaaaaattagttgggtgtggtggtgtatgtttgtaattttagttatttgggaggttgaggtatgagaattatttgaatttgggaggtggaggttgtagtgagttgagattatgttattgtattttagtttaggtgataaagtgagattttattttaaaaagaaaaaaaagatagatagatgaatggatagatagttagatagatgatagatggatgataggtagatagataattgataaatagatataaatgattgatggataggtagatatagatatattgattaggtagatgatagatggatagatagaagatagatggtggatgggtgggtagataggtagatagatagttagaaagatagatgatagatagataggaaggaatttattaggggaattggtttatattattgtggaggttaagatgtattatagaaggttgtttgtaagttggaggtttaggaaagttagtattgtggtttagtttaagtttgtaggttttaggattgggaagttgttgatgtaatttttagtttaaggttaaaggtttgagagtttggggaattgttggagaattgggagttttaagtttaagggtaggagaggaaggtattttatttttaggagaaagagggaatttattttttttttgtttttttgttgtttggtaatggaatggtgttatttatattgagggaggatttttattatttagtttattaatttatatgtttattttttttagaaatatttttatagatatatttagaagtgatgtgttattagttattttttaatttagttaaattgatatttgttgttagttattatataggtttagaagaattgtggttgtatggtgatggtttttattttgtttaaagaagttgaagatgaattgttggtataagttattgtttttttaggttttttttagttgtttatttttttaaaaatgtatttattgagtatttgttgtatgttaggtgttgtgataagtattggggtatagtagtgagtaaataaggatttttgttttttggagtttatatgtagtagaaggaaatagaattaatgaatttattagttttagaaattattaaaataggattaagagttgtggtgagaattaagataaggtgattgtatagaaagtgattgatggttgttttggaatgagtggtgaggggttatagagatgatgatagttgagttgagattgggaagataggaaggagttagtagtgtaaggattaggttggaagtaagtttggtgtattttaggaatagtaaggaggttagaggggttgtagtagagtaggtgaggaggaggagggagatgtaggttaaagaggagtttggggttagatggaggattttttttttaaagtttagttattttttttttaaaggagaatgtgttatttttaaaagttatatatgttagtatagtgtttggtttattatatgtttttagtaggtggtgagtatggttgtttttgttattattatattataattattaggaataatggagttattaggttttgtatttatagtaatgtgagggagttagtaagtttttttggggaatttatttttttttattaagtttataagagtttgataattaggttaatgtagtgagagttatagttgtttagtgtattggattttttagttatgggttaggatatttttattttagtagaaatttttaaggggattggggagtgtgttgtggatgtttttgggttatttagattttttggggagttttttttattgtagttgttgtagggagtttagttgtagtgatgaattgtggtttagttttgtttatgggaaaattttatatgggagatgggatggttttttgttggtttttttggttttaggttgtttttataagtgtagggatttttatttgggtgtgtgaatggggtttaggatgttttaagggtatgtggagatgggggttagttgttttttttgatgtttttgaattttttttttttgtttttttgtattttattgttttttggttttttttattttgggtgttttggaataatatgtaatttaatatataggttgattttattattttgttttgttttattttattttattttggaaataaaggttttgttatttagtttggagtgtagtggtgtaattgtaatttattgtagttttgaatttttgggtttaagtgatttttttgttttagttttttaaagtgttgggattataggtatgagttgttgtgtttggtttaggttggttttaaaagttttttattttttttgtattttgatgatatttattttttggagtaggtttttagttattggttttggatattttgtagttattattggttagttgtggtatgtgaagttgaggtttaggagaagggtagttttgtttaaggttatatggtttagtgttaatatttagattttagtgtttttattttttttttggttgtttttatttttagtgtatttttggaggtttaagggagttaaaggttaggttttggttagttaagaatttaaaaaagttgtttttgtgtttttttgttaatttattattttattattttttttgataatgaatttagtttgaattttagataaataaggattaatttttagtataagtatattttataatagatttgggatatatttatgtttaaaaatgatttattgtttgttggttttagtagtttatgtttataattttagtgttttgggaggttatagttggagaattgtttgagtttaggagtttaaggttatagtgagttatgattatgttattgagttttagtttgggtgaagtagtaagatttttatttttttaaaaaattgttgattgtttatttgaaatttaggtttaattgagtattttgtattttatatgagaattttatataggtgagatttagagttttaatgtttattggtaagtttttgtagggaggttttgtgggtttttggttggtattgatgttttgtgatgagtagggttatttggtaaggtggatgtttgttgtttatgtaggtagagtaaggttttgggtaggtatgagttgattttattttttttagtttgggagttagatattgttggtagtttgttgttaagagaggggttggttattaagagaggggtggtttttatgggttttttttggtttttggtttttttttagttttttttttattttaaatagaggttaatggtattgtattagaattagtgtgttgttttttttggttggtattttgtagttgggtagattgttttttttttataggagttggtggtgttttttttgttttatagggaggatggttgagatttttgattttgatatagggtgttgttttttttttgttttgagatagagttttggtttttttatttaggttggagtgtagtggtatgatgttggtttattgtagtttttattttttgggttttagtaatttttttgttttagttttttgagtagttgagattataggtgtgtattattattgagaataatgttttttatagtgtttatttttttgtaggagtaagtttttaaggtaaggaggttgttttttttatggatgaataaattgattttgatttatagttttatgtgttagttttgagggtggggaaaggttgttttgtgtttaggtagggggtgggggtaaggttaggagggtttggtgtttagtgtatttttttaggatataattttaggtagtagaggttaaggatagaggggaggagaagagggaggtggttattatttttttattttagttttttttggagataagtttgagtattttagttgtttattaagtttggagataagtttggaatttaaatttttgattttgatttagttttttatagtttttgtgagtaaattgagttttagaaaaagggagtgaagtttgtgtattttggatgtttttattttaggtttaaattgtttttattttaggtttaaattgtttttattttagtttaaattgtttttattttaggtttaaagtgtttttattttagtttaaagtgtttttattttaggtttaaagtgtttttattttaggtttaaagtgtttttattttaggtttaaattgtttttattttagtttaaattgtttttattttagtttaaattatttttaatataggtttaaattatttttaatttaggtttaaagtatttttattttaggtttaaagtatttttattttaggtttaaagtgtttgtaatttaggtttaaagtgtttttattttagtttaaattgttttattttaggtttaaattgtttttattttaggtttaaattatttttattttaggtttaaattgtttttattttaggtttaaagtgggaaggagttatagggaaataaatgggggaggtatggatgattaggatgagggtttttatgatttatttttttttaggggttattttaagagttttttaaatttttattattttttaatagagatggggttttgttgtgttgtttaggttgatttttaatttttagttttaagttatttttttattttagttttttaaattgttgaggttataggtgtgagttattgtatttggttttttttaggagttttaagaaaaaaaatgggaatagatttgtgtgtgtgtgtgtgtgtgtgtgtgtgtgtgtgtgtgtgtgtgttttgagaaagagttttgttttgttatttaggttggagtgtaatggtatgattttggtttattgtaatttttgttttttgggtttaagtgttttttttgttttagttttttgagtagttgggattataaatatgtaggttgattttgtatttttattagagatggggttttattatgttggttaggttgattttgaattttggattttagatgatttgtttgttttggttttttaaagtgttgggattataggtttgagttattgtgtttggttaggaatagatttttttttgtagatgatttttgttattattgaaaatggatgtttatgtataattgaattgttataatgttttattttaaaaagtttttttttgagaaaatgtgatttttgatagaggagagattgtttaggttttatttattgttagtataaaggtagagtaggggtgtggtggtgttatttttttttgagatagttttatttttgttttgtttaggggtttagaagtttggtttatttgagtttatagaggggtttggagtggttgttttatattataggtggggtttgtaaggatttgaaatgatttttgagaaggtgggtgtggtgggtgtattttaattattaaagtaataataatgatatattaaatagtgtttgtttagattttgagtgtttgtttaaatatttttattttgtgatttgttagattttagtataataatttaggtaaaagaaaaaatagttgggtgtggtggtttgtgtttgtaattttagtgtgaggttaaggtaggaggattgtttgagattaggagtttgagattagtttgggttatttgagattttatttttgaaaataaataaattaataaaagatttttatgttttatgttttttttatatttaggttttttaaattatatgtattggggaaagtttattaagagaagtttttggttgggtgtggtggtttatgtttgtaattttagtattttgggaggttaaggtgggaggattataaggttaggagtttgagattagtttggttaatatggtgaaattttatttttattaaaaatataaaaattagttgggtgtggtagtgtatgtttgtaattttagttatgtaggaggttgaggtaggagaattatttgaatttgggaggtagaggttgtagtgagttaagttggtgttattgtattttagtttgggtgatagaaaaagattttatttttaaataaataaataaagggagagaagtttttgggtttttagatatatgggttagtgtttatttttgtaaagttgttgtgtttaaagaggggttgtatttggtggaattggggtaaaagagtagggagggtattgggtagttgatttggtttttattattggaaaggggttgtgttgttggtgttttgagttggttttataaggaagatattgtatagggtgttttaagtttgttttttttgtttaggtttatttttttttttttaggattagggagttttgtttgttttttgtttttggtatttgttttttggtttgtgagtattgtatttttttttgtttggaatgttggtttatggtgggtttttggatttttgttttttgttgttttttgttatattttgttaaagtgtgttttatttatttattgttattattttttgaaatagagttttgttttgttgtttaggttggagtgtaatggtgtgattttggtttattgtaatttttgttttttgggtttaagtgatttttttgttttggttttttgagtagttgggattataggtgaatgttattatgtttggttaatttttgtatttttagtagagatggggtttttttatgttggttaggttggttttgaattgattttgggtgattggtttatgttagttttttaaattgttgggattataggtgtgagttattatgtttggttaattattataatattgatattataataatattatagttagataatggtgattaatgtttgtaatttgaatattttgggaggttgaggtaggtagattatttgaggttagtttgagattagtttggttaatgtggtgaaattttgtttttattgaatatataaaaattagttggagtgtgatggtaggtgtttgtaattttagttatttgggaggtggaggttgtggtgaattgagattgtgttattgtagtttaatttgggtgatagagtaagattttattttaaaagtagtaataataataataataataataatattatttattgagttttaattttgtgttaggtattgtgttagtatttgtgttatgtgattttattgatttggaataatttatgagtaagtattatttttgtttttaaggaagttgagatttaggaaatggaagttattttttagggtttatagtaagggtttggtgaggtttgtgtttaaattttgattatttgattttaggtttttttgttttttttgttttttaaaaatttaaatatttttatttgggatgattttagatagttagattttaattgttttttttttttttgagtatgttttattttaaaattatataaagataatttattttttaattggagttatggaattgttagatgttttggagatttttttagttatttttttgttggatttagatataggtttgaataattaggtttaaggagttgaattggagttgtttgtggttagaggtttttttttgggaatagtagtggtggtagtggttgtgttgagtttggtaatttgtttaagagtaggggatgtttaggttgtgtttgttttttttttatgaatggtttgttttgtgttttttttgtgttaagggttgttaggtattagatgtttattttaggaaattagaaaaataaatagtgtaaataaaataaaaattttatttaagaaatttgagatagatgttgttttttttattgtttttttatttttatgttgggtttggagagagtgggttagtatgttttttatggataagaggttttggggtatttaatttggatggaattttttttattttttttttgtttggtgttagggggtagaaggtaggggtggtgtttatttggtttagggaggaggatagggtagtttttgttgttggtattttttgtagagatgttttagttagaagtgattttatttttaggaatgtgtgttttgttttttgttgggtggtttttttttattttttattgtttttatagtggggtgtgttagatttatgggtagagttttggtttatttttagttttggatagtagaatgttttagtagtgtattgatggtgtgtgtgtggggatgtgtggaataggggatagtgattttgtgtgtgttatatgtagtgtggtttttagttgggtgtgtgaagggggtgtttatggttattgtggaagtgagtttagttggggttggagggtttaggtttattgtatgttatttagtagttttgggagtggggtttatttttttttttgtttttttttttttttggttttgggtagtttattggagttgtattttgggttattttttttggttttaaggaggttgttatttttgggaggtagatgttggtttttttatttttgttttttggagatttgtgttgaggtttgtttttttgtttggagggattggttaggaatttttgggtttttttggtggggtttttgttgtttagtagtgagtagagtgagtgggtattaagaggaggatgttgggtgaggttatggatatggttggggtaggttgggggtgttggaggtgaattttgtagttgtgtgattttgggtagtttgtttagttttgggttttgtttttttttttatgaaatggggtgggagtatttgtttgttggggttgtgggttgggtgaattggagttaaggtatagtttatagtttgttgttagatttttgtaagtagaagtgggtgtttttgtttagtgttttttggttttttttttaaggtttagttttgtttttattttttttatgaagtttttttggttattttaggagttatgatttatattttttttggagttttgtgttatatgtattttttatggtgttgttttttttggaggatgggtttaattaaaattggggtttatttgggggttttttttagtattagagaagtttaggtttagtagagatgggtattttgttaatattagttttgtgaaggatatattgtgtttattttgttgttagttgttgagtttggtgttttgtagttatggaatatgtgtataggtttgggttgttggatatgaaggttagatgggtagtttattttgtttttgttttgagtttttagaaataagttggttgtatttatttttatttggttatagtttaggagtggggttgtggaatggatggaaggaaggatgagtgggtgggtgggggggtgggtgggtgggtggatggatggatggatgatgggtggatgggttgatggatgggtggattaggtggataggtgaatggattggtgggtgggtgggtgggtgaagggttgaataggtgggttgggtggatgggtggatggatgtgtggaggggtggtggggtggatggggtttatgggtgaatggatggatggatgggtgaatggagtaaatgagtgggtggatggatggatggatgttgtaagagtttttttggagggttttagggaggaattggtatttttgattagtagttagtatggtgattagatatagggaggtgtttgggtttgtttgattttttattttattgttggtgggattgggttggttatgtgtttttgaagttttttgaagggtggttgtatggtattgtttaggggatatttttagagtgttgtgttttatagtaatagggtggttgtttgtgtttttagggttgttttttttggtagttttttgggtttgtttggtttagtattttagtaaatttttttgagttaggatttgtttgttatgagtttttttaataagtagttttaggttaaggtttgtgtgtgggtagagggagtgtatgttgtgggaggttgtattaatttgaggttttgtttttgtttttttttggggtaaaaggtaaaaatagtttgttttattttatttttaaatttagtttggttgtatttagttttgggagtgaagggggttgggttaggattgtttgtgagttgtagattttggtgtagggaaattttgatttataagatgggtggatatggaggaaggaggagattttgtttagtagagatatgtttgggtgtagtttagtttggagtttgatggatgtgggtttatttgtgtgtaatttttatttattgtgtggttatagggaagtgatattttgtggagatttagattttttatttgtaaaataggggtagtagggtttgggggaggatgtgtgtgaaggtttggtttagggtttttttagtagttagatagtagtggttgttatttttttagtgtttagggttatttgggggagtagggtttttgtttttagatgggttttgtttttggttttggaatttatagtaggagtaaaggtgaggatatttttggtgttaattatttatttggagggagagtgttagtggttttgtgtgatttttgttttttgtttttgtttttaggaggtatgtggatttttagtggttggttttggaggtttggtgattttagtggtttaggtaggtggtttgttttgttttggttttatttagtttatgggtgtgtttgtgttggggtttttttattttggtttgggatttgtttttttatttggtttttttggatgagtggggttatttgtttattttttagggagatgtagtttttgatggttttggatttaggtggtttttaggtttgttgatgttgttttgttggagatgatttttgtgggggtaggggtagttatttttaggtttagggagtaagtttgtgtgtgtgggatagaggagagaataggagatagatagggttggatgatttggtttgagatgttgaggggatagatgtgttatggataggtggttttggttgtgagttttttggtgttggtttagtatttgtgggttttttgtaattttgtaggatggaagatgttttaggatagagtagatatgtttggtgttatttaggaggaaataagtgggtttttggtagtggttattgtgttattttttgtgttttttttatgtgtttggaaattttttatattaattagtagggaagggaaatagatgtatttattagagttttggggttggttgtttaggatatgagttatagtttataggtttgaagggattttattaatattgggtgtagtttgggtaagggagtgggatagagaggttagggttttgtttttagtttttgttttttagggttgagtttgtgtgttattttttttttattgggtgtttttgattttttttgtttgattttagtgtggttatgttagtgtttttgtttttgggagtttatgttgtttttggttgttatttttagtggttaggttgggataggtgtttatttagtggtttttttatttggagaggatgatgggttatagtaatgaatggatttattttttttaggagatgaggagttttgagaagagtagagatggtgtggttatttgtgtatatgtgttgggggttaattgggtgttagatttttggttgttattatggtggtagataggtagggattgtgtttttatgaattagttattttagaggagataaagttattaaaggatatggatttggagttaaatttatataaatagagtgtttgtggattagggttgtttttagaataaggtgagatagttgttttgttaggataaggtgtttatgggggtaagggtatgtgtttatttggagttgttatttttatgttttagattagttttgtttaatagaattttttgtgatggtgggtttgttttatatatttgtattttgttattttgtatggtagttgtttagttgtttgggtttattgtatatttaaagtataaatgtttatgtttattttatttatttatttatttgtatagaattatttatttattttaaatggatttttatttatatttatgtgtggttagtggttatgaaattgaatagttttagattatattggtatttgagattttagaattttagatttaaagtttgtttttgattttgagtttgtttttgtggggatagtatagatgttttttaagtttgttttttagaggtggatgtagtgtttgtggattgtgtattattaggtttggatagtggagagggtggttttttatagggagtgggagtggaggggatgttgtgtttatattgagtgtatgtgaggttttttgtagtataggatgggattgtatgtgggaagaggggggtgatgttttggttggaggtttttgggtagttgtatgatttagtgttgtggttaagaggggttttgtttattgtagttatgttgggtattaattattggatagtttagttgttgttgtgtttttggggagtttttttttggttttgtatttgatttgtttttttattttttttttttttattggttagtttttggtggaatgggtggggagggttttttagtttttgtgggggttgtattttgggaatttggtattttgggttgtatggatatagttttttttggtggttgtttttttttgtttagattggttggttttgtgttgttagtatttggtagttatgattatagtttagtttggaagtttaaggtataatttgttgaattttaaagttgtaagttggtgatttgggtttgtgtgggattgtttgttgatatatggggttttttttttgtgggtttttgtgggttttggtttgagatattttttttttatttttttggtttttttttttttttttgttttttttttgttaagattttggtttaggtaggagtttatttttagatgttttagtatttttggtttttttatttgatattttttagatgattgtttgttattttatttttttagtttagtttttttgtagatttatatttggttaattttttatgtttgggatttttgttttttttagaaggatgaaggttttttttgaggttgtgtttgggattgggttagggatgatatttttggtaaaagtttaaatgatattatgattaatgttttggttagtttatatattttttttttttttaaaaaaaaaatggaatttttagagttataaaataaaaatgtaaagaataaggtaataaaatatttgtgtatttattattttgtttaagaagtgagatattgtaggtgtagttgtagttttgggtgattttttttattttagttttatttttgttgtggtgtttgtttttttggattgggatttggttttgggtaggtatatttgtgttgggtagtggtgtgtttgagaagtttaggtttttttttttttttttttgagatagagttttgttttattgtttaggttggagtgtagtggtattattttggtttattgtaatttttgttttttgggtttaagtgatttttttgttttagtttttttagtagttaggattataggtatttgttattatgtttggttaattttttttgtatttttagtagatatagggttttattatgttggttaggttggttttatatttttgattttaggtgatttatttgttttggttttttaaagtgttgggattataggtgtgagttattgtatttggtttggtttttttttgtatatggttattagtattgtgtgattgagtagtttaggtttgtttttttttgaatgttgttattagtattatatttttggtgttttattggagttagtggttgttttgtttgtgtttataatgtgatggtgtggagatttatttgtgtagatttatgaagttttggtttatttattttggtagttagtgagtgtttttttgtgtggggaggtagagtttgtttgttttgtggtttattggtgatattgttgaaggttttttttgttattagtgttgttgggaatgtgtgtttttttaggtggatttggttgggttgtggagatgtgttttttagtttttttagatgttattattatgtttttttgagtggttttttggtaggtttttttatgtttgtttattttttgtgttttaggtagttgtttttttgattgagtgtttagtggatttttgttttgttttttatggtgtatggagtattttattttagtggtgtttgagtttttttttttttggtttttagattttggttgggatttttggagttaatttttttgtttgatattttgtgttgttaggttttgtttttttattttttaatatttttggggtgtgtggttttttttttagtgtttttattattttttttgttttaggttgaattgtgttttttataaatttatgtttattaaaaattttagaatgtgatttgggagttggagatggggtttttgtagatgtaagtagttaaggattttgagatgaggttattttggattagggtgggttttaaatttaataattggtgtttttaaaagaagtagagaggttatagatatattggggagagttatgtgaaggtaggagtagatgatggagtgatgtagttttaggttagggagtgtttgggaagaggtaaggaaggattttttttttattttattttagagtttttttagggagtgtggttttgttgatattttgattttggatttttggtttttagtatgggagagaatttgtttttatttttttaagttttatagttgtggtttattatggtagttataggatattgatgtattttttatttggttgttgtggatggatgattttgtttgtaggaagttttttttaagtattgtaggtgtttttgtttttataggggatgtttgtataagtaggtgtgaaaaaagggttttgtgggggtaaggtttgggttggtgtttgttgtttttttttattttatgttagtttttatgttttttttggtaggagtgtttggttttatttggtgaattagagttaaatttttttgataattggttgttatttatttaattgttattatttttaggagatagaaaatgttagaagggtggggtttgtgtagtgtttttttgttatttttttagggtattgtgttatgttgttttaatgtatagagtagttgtttaaagtgtgttggatgaataggtgttttatgtttagttatgtagataaaagtgtgttatgtggagggagttggttgtggaagagattattagtattttggttgtttgaggattttgtttttgggtttttgtaggtatttttagtttattatttttttttttatttatagttatttattttttttttatttttttgatattagttttgttatttatttaggtttgtaagtaggaaattttagagttgattttgatttttgtttttttagtatttttaggttttaataggttgttaagattttattaatttgttttttgtatattgatttttggataggttgttttggttatggttatgttttggttgggtttttattatttttttttggattagtaggtgttattttttttatttttgttttgttgtggtttttttttttttatggttaatatttagaggatgattattatttttttttttgtgtgttggggattgggtgataggatttttttatttgattatttttattagatttgggttgggtttttttatttatagagtttttagtttttgtttttaaagttttgagggtggatttgtgttgttgtttagtttggttttgatattgttttttagtttggagttttttgtttttgtgtttttggttttgagtgtttgggttttttttggatgggttgttatttgttttttggaaagtagggtttttatgtttttggattttttagttgatttagtgattttgggttattttgttatattttttttattagtttggttttggttatttttgtgttttttatagttttggattagagttatggtgggatgtttttttggtgtgtggtaggtagttaggaaatattgttggattgattttgataggagatgtttgggagaattgtttaaaaaattagtttaaaatgtaaatattggtttttttttgtgttggttaaagagtagtatttttttgtttgttttttgggtaagaaattgatggtgaatgtaatgtttttagggaggagaagaaggtgataaaaagggtttgtataatggggtatatgttaggtatttgtgattatttaagtttaaattataatataaatgtgaaattttttgttttggtagtttttttatattgtaagtgtttattgttatatgtggttgttatattgattatggtagatatagaatattgatattattgtggagagttttatgggggggtgttggtttagattatttttatgttggatttataaatttattgtttatttagtgaatggttattgggtatttattgagtaagtaggatgaaagatatttgtttttgggggagttttttgttggttgtagagaagtttaaatttaggggatttggggtaaattttgtaagggtttttggtttttgtatttttagattttttttgttttgtaggggtagttgggggttttttttaggaatggagtgttagttttagtttttgttaggttatagtttagatggttggttgagtatgagtatgtgagagtggaattgggtttaattgggttgtttttttttgttgttttggtttttttttatgttgatttggaaggatttttaaagtaataggtttgtttaggtggtttgtattagtaaattttgtagtggttttaagggtagagatagttggattgtatttatttaggaatagttaaagtttgaggtataataaaaagtggagaaagattttagagaggaatgtagttggttttagtttgggaatttgttttgtttgggaggttgtaggtgggttaggttggggttagtttggagggttttggttggttttgttggtaggtatagtagtagggttagtaggagggagtttaggatggagtttttttatttttaatttagggaagtaaattttagtggttgagtttgaggatgagtaggaaatgaatggaaaagtttttttttttttttttttttttttaggtagggtttttttttgttttttaggttggagtgtagtggtataattatagtttattgtagttttaatttgttaggtttaagggatttttttgttttagttttttaagtagttgggattatagttgtgtgttattatgattggttaatttttaaaagaaatgtttttaggttaggtatggtgatttatgtttgtaattttagtatttttggagttgaggtgggaggattatttgagtttaggtgttttagattagtttgggtaatatgatgagattttgttttgattaaaaatataaaaagttagttgggtgtggtggtatagttttgtagttttagttatttgggaagttgaggttgtagtgagttgtgattatgttattgttttttagtttgggtaaagggagtaaggttttgttttaaaaaaaaaaattttttttttttttgaggtggagttttgttttgttgtttaggttggagtgtagtggtatgattttggtttattgtaatttttgttttttaggtttaagtgatttttttgttttagttttttaagtagttgggattataggtatgagttattgtgtttggattttttttttttttttttttttttgtagagatgggatttttttatgttgtttaggttggttttgaatttttggttttaagtgatttttttattttggttttttaaagtgttggaattataggtgtgagttattatatttagtaggaaaagttattttttaaagtgagaggttgtgtgttttttatagtttggtgtttattagtatggaggatttattggaatgtgtgttaggtgaggggatatggaagatggtagtaaatttgagtttagagtattagaaagtatgtttttagttaaagatgtgttttttttatttttgtgtagtatttttttttagtgtgtatttttggagtaaggtggggttgattttatgaagatttttttttgaaggtttttgttgtttatattagtgttatttggattgtttgtttttttttttggatggttggattagttttagggttttttggtttggtgtggggagtatagtttattttggggaatgtttggtatgtgttttttttttattgggtattaggggatgaagttgtgttttgtggaaggggatagaggtgttggtgtttaggatggtgtatttggggtggttgaattggatttggtttttattgggtttttgtggagtttagattgttgtgagaaggggtggggaaaggtaggtgatttgtattttttatttttgttttatatgggaataggggtttattttgtatatatatttagtttggagtatgaatttttatgaagaggaaaatttttattaggttttgatgttaggattgtttgtgagggttgggttgtgttttggggtaaggataggagtggagggggtaattagggaaggttttttaatggaggaggtatttgatagtattttgaaaaagaagtagtttttaggttaagttagagattgaagaatgattatttaattttttttttttttttttgagatggaattttgtgttgttgtttaggttggagtgtagtggtgtgatttaggtttattgtaatttttattttttaggtttaagtaatttttttgttttagttttttgaatagttgggattataggtatgtgttattatgtttagttaatttttgtatttttagtagagatggggttttattatgttggttaggttggtttggaatttttgattttgtgatttatttgttttggttttttaaagtgttgggattataggtatgagttattgtatttggttatgattatttaatttttttttataagatgttttttggttgatgtaaagtaggttgagtgagtgtgatattttttttttgtttgtgggttttggtttttttagagtttggttagtgttattggagataaagtggtttttgttttttttttttgttttgttaggtttagtttgtgttgttgagttttattttgtaattaagaggagttgtgaattagtgatgttgatgttgtagaaaagtggttaggggtttatggggggtgaaggatagggatgttgttttgagaattgtttggaaggggtttttgggtaatagtgtttattttagggtgtgggtaggttggggtggttgggagttgggtttataggttggtataattagagttttttaaagttgtgggtttgagggttttgtttttttgggatagtaatttttggtttaatttgggaaaaggtgggttaaattaagtttggtttttttattgtaggattatttagtgtgtttagtatgtaaatgtgtttttgaatttaagataggattatagaaatttttttagtgtttttttggagggagggattgtgggggatttattgtaggggtttgggtttgtattggtttggtgaagtgtttttttagtgtttatattatgtgtggtgagaggttggtttttgttttttttattttttgttggttttattttattatttttgtatttgttttttagttggtttatgattaatttttgtttttttagagttaattggtgttgttaggttttttattttaagtgattttttgtttgggttaaaatgtttggatttttaggtatggaggggagatggattttaggttaaattatgttgggtaaaattgagggttaaggttgtgtttagtaagtgttttagttttggttgttaaatttatagtgtgtatagtgtgtaggaggtggttgggtgaatgaatttagttatagtttggttttttatttggggttgtttttaagtttttattgttagttaggttgggttagagttttgtggggtttttttgggtttttttgttttatagtaggagtttgtatggagagttttgagtgaggttaatgggtttttttttttttttttttttttttttttaatttgagatagggttttattttttttatttagttagggtgtagtagtgtaattatagtttatagtagttttgaatttttggttttaagtaatttttttgttgtagttttttaaagtgttgagattataggtatgtgttattttgtttagttggggtttttgttttttatttttttttttgtttttaaatttaatataaagaaagatattatatttataattagaaaaattaataaggaatattattttaaaattggaaaagggattaaagaaataaattaagaaatttttgtgatttttgtttattggagttagtggttgttagtggttggtttaatataatgttttaggaagaaatagaataatagaaagtaattttagtgagttgagttttggttttgtttgtggtgttgtattagttttttgtagttgttgtaatgagtggttataagttggttgggttataataatgtttagttatttttttatagttttgtaggttatatatttgagattagggttattaggttgaaattagggtgtttattgggtatagttttttggaggttttagggtaggggtttttagttttgtgtgttttattaggaattggtttgtatagtaggaggtgagtgattggtaagtgagtgaagttttatttgtatttatagttattttttattgtttgtattattgtttaagttttgttttttgtttgattagttatggtattggatttttataggagagtgaattgtattgtgaatggtatatgtgagggatttaggttgtgtgttttttatgagaatttgatgtttgatgatttgttattgttttttattattattagatgggattgtttggttgtaggaaaataagtttagggttttaattgattttatattatggtgagttgtataattattttattatatattataataataatagaaataaagtgtataattaatataatgtgtttgtggttgggtgtagtggtttatatttgtaattttagagtgaaattttgttttaaaaaataaaaaataaaggttaggtatagtggtttatgtttgtaattttagtattttgggaggttaaggttggtggattatgaggttaggagtttaagattagtttggttaatatggtgaaattttgtttttattaaaaatataaaaattagttggatatggtggtaggtgtttgtagttttagttttttgggaggttgaggtagaagaattgtttgaatttaggtggtggaggttgtagtgaattgagatagtgttattgtattttagtttgggtggtagagtgagattttgttttaataaaataaaataaaataaaataataaatataatatatttgaattattttaaaattatttttttattttttggtttgtggaaaaattgttttttttgaaattgattttaggtgttaaaaaggttgggggttattgtttttattgtttgtttttttgagtttttggtggttgtgggtgttttttggtttgtggttgtatggtttttatttttaatattagtatttatagatttttttgggttttatttttatttggttatttttgtttgtgttaaatttttttttgtttttgttttgtatgagtattgagattgtttttagggattatttagattatttagggtgtttttgttatagtaagatttgtaattgaattatagatgtaaaaatttttgttttaaataaggttttatttgtaggtttagggattaggatatgttatttttggggttattatttagtttttttttgtgattatgatttttttttttttttttagttttttattttggttgagatgttgtttttattttttttattgtttggttgtttgtggggttgttttttaggttttttgggaggaggtggttgtttgatgttttttagaaggttgggaatggttttttttattttttaggaagatgttttttttgttaaggagattgtatttggggttttattttaggtagagagtggatgggattgtggtttgaagtggtattttagggtttttggttttgttatttagttgagggttgtgtatgggttttatttggttataggtaatttatttggttttgtggggtagggattgtaaatttagaggtttgtggggtgtgttgaggtagaggggtgtaaatattgtaaatttgttgggggttttggggagtagtatagattgaaaagtgttttgtttgaagagtagaattgttttatattagttttgtgtggttaggtaggaaggtttttgtggtgtggttatgtgtttttttttttttaatagaagttgatagtttggagtttttagagagattgtttgagtttttagttttggtataaatatatattttttttaaataggtttgggttaatagaattagtttttgtgttttgggtttgaatgaatttttgaggtgaagtttaaagatagagaggatgtttttgatttttattttagggatttatattgtaaatttttatttgttttgttgagtttttggttttagtatggattttgattatgtgttggtggggattttttaggtaagtaagtagtttttgaggattttggatgaatagtggggaatagtattgattttttagtggggttttgagtttttggagaggaagatttgtttttttttaggggatggttagagatttattgatttatgtgtgtgtggtaggaattttttaggaagtttttgttttgtttgttttttttgtttgggtggggatggtaattgtttttgttattgtagattaatgggatggaggggggtgattttttagggttttttttgggtaggtgttttggaatttttttttagtatgttggtttggggtatggttgttttttttgtttagttatgttggggtatagggtgaagaagggttggggttagtttaggatagaggaaggtgaggtaggtatgtaggaattgggttttttaaatttttaagtttaaggaaattgtagtattgtgggatagggaaaatgaaagattttggaagttgttaggaatttgattttgtgagttggtttttaagagtttaagttaagtatttttaagtggatattaaaaaggagtagtaagttttggggtggtgggggttggaggaggtggagagaggaggttgttggaagttgtatttgggatttttgtagttattgattagattgggtggttgggattttgggatttttgtaggtagatttggtggtttgttggattttttggggtttattttgggtttttttttttgttttttatttttggattttttttttttgttttttttttttttttgttttgaagagataatgttattttagtttggagtataaatatatgattagtatatggaaatgtggtaatttggatgtatttgtgattgtaatagattgaagaaattagattagataaagagtgtttttagaggaggaggaggaggaggaggaggttgagagagggagggtgatgggggtgagaaaggggaggttgtttttgagtgggatgttgggatttttgttgttgttaaatatatttgtaggaatggagagggattggattttaggtatgtagatagttttttttttattggttgttttttattgttttggatttggggttttatttatgtttgggggaataagtatgtaaagggtgtttttgtttattttttatagaaatattttttttttttttgatggttttaagtttgtgggatgaattttgttttagaagttaagtttttttgagtttggtttttatttaaatttggttttttttttttttggttattttttttttattttttagtgtgttatttttgtatgttatggttattgttaatgttgaggttgttggtgttgaaattttgggagggtgtgggggatttgtttttttggtttgggtttggggtggtggtgtttggatttggttggtggttggtttgtttattgtgtggtttgttttttgtttttagttaaagtttgtttttaaggttgttttggttttttatttaaaatagtatttttgtgtttttttggtagttgattatagagggggaagtttttggtgtttagaggagtttggtgtgtgtgtgtatgtgtgtgtgtatgtgtgtgtgtgtgtttatttatgttggtagtttttttgttgtaggtatagatttattagggtgtgaataggtaaatgaagagaaagggggtttttttgtttttagtttattttagttttttaggtttttttttttaggtttagtttttttggtttttttatttatatgtggtgttgtggttgttattttatgtggttagtgttgttattggtaattagtagtgatgatagtttttgttgtttatgttgttttttgagtttagtgttgggagatatggggtggttgagttaagttttaggttttgggtattttgaagtgatttatgggttatggagtgggaggttgttaagagtgttaatttttatgtgttttgggttttggtttgttggttgttattatgtgtgtgttggggggtttttgagaggtttgagagagggaggtttattttggtggtttttttttaggatgtgtggttttttttattattgtttttagggttatatttttttttttttttttttttgagatggagtttggttttgttgtttaggttggagtgtagtggtgtgattttagtttattgtaagttttgtttttttagtttatgttatttttttgttttagttttttaagtagttgggattataggtgtttgttatatttttttgtatttttagtagagatggggttttattgtgttaattaggatggttttgattttttgattttgtgatttgtttgttttagttttttaaagtgttgggattataggtgtgagttatggtgtttggttttagggttatattttgattgttatgttgggattggtggagtgggtgtgtgttgtgttgttgagtatatttagttgggtatagtaggtggattttaggagggggttaggggagatggtagaaggtttgggtggtagtgaaattgtattttatttgtttgagtttgggggtttaggtttgttgggatgggtgggtgtggagtttagtgttttgttttttgtttagtaggagttgtagggtagggagtgttgagagggatttttgttaggtttgtatagtggagttgtttttggagtgattattttattaggtagtttgggtagattatagtgggttttttgttttttgggttattagttttaggaggatgttattttatttgtttggttggtaggggttttggggagttttgggtttggtttttattttatagatgatttagttgaggtttagatgggtgattagtaggggatttgagagttgagtagagaggtgtgggtttgggggtggtgttttttggggagttggaagtgatggtatttttttaggtttataaaatatgggttttttatgaattgaataaaatattttttgaaagtagttagtgttgtgttttagagattattttgatttttgttgtttttggttgaggatagtatagttagggatgaagtggggatttttttttgggttgtgttttgatgaaagatgttttttataaaattttatttggatgtgtttttatgtaagaaaatgtatatttttagaaatttagttgtaaattggttgttttttgaatgaatatgatagttttggagttgttttttttaatgaggtttttgttttgggtaaattttagtgttggtttttaattgttattgaatttttgtatagtttttggggaagtgattttttttttgtttttgttgggtggttttgagtaagttatttggtagttttgggttgtagttttgttatttgtaaggtgaggggtgggagtggtatggtttttaggtagtgtttttattttttgtgggtttttgtgtgtgttttgagttttgtgggtgtttttttttttattgaggggttttttttttttgtagggtatggtttatgttgtgttgttaggttgtaagttattgtgagagttgttttgatttttaagtatgttttggtttgaggaggagttatggggaggatgttgtgtttgtgtgatagaggtttgtttggtagatgttggtttgttgatttttagatgtggttgtgggtgttttatgttttattgggttggtgtgtgaggtgtgtttagtttaggttgttttatagttgtttaggaagggtttgtgggagggggtggttttattttggtgagtttatggtggtttgttagttttagggaaggtttaggagttttaagatttgtttttttgttttttttttggtagtgtttggttttggtttggtttgtgaatgggggtttgggtatttttttgttttttttgggggttgtggtttttttttgggaaggtgttggagggtttgttagtagggttggtatgagttatggagtggtgattggttgttgaggtatggaaggttattttttttagttaagggttggagttttttttttgttttggaatggttttgtggtttttataaattaagtagttttattttgttttaagagtttgtattttagtagggagagagtttttaagaagggaattttttattggggagttttgttgggttgggaggttaggaataggttatgagggagggttgtaggtaggggaagtggttgtttgtgtatggttatgaatgtaggtttggggttttggagggggtttggttatgttgttgttggatgtttgtttttattagggtttatttgatgtagtatggtatagggtaaagtttagttttttttatggggtttttgggttattagtgggtggggaattgaggttttttggagggtggtgttttagtttttattttttttttttgttttttgttgtgttgtttttgatggtttttgttattttttgggagtttttatttttggatgtttggtgtttgtttggttttaatttttttagttttgtttttttatttttgaggtgagaggtttggtttgatgtgttttgtatttgttttttgtttagttttgtgggaattttggtttttgtagtggttttttggggttgttattattaagtgttataaattgggtggtttaaaatattagatatttttttttttgttgttttggaggttagaagtttgaaattatggtattagtaggtttggttttttttggaggttttgagggggagtttgttttttgtttttggtagtttttggtggtttttgaaatttttggtgttttttggtttgtggttatattatttgatttttgtttttgttgttatggggtttttttttgtgttttaaatttttttttgtttgttttttatatggatagttttttttggatttagggtttattgggtaatttaaaatggttttattttaagatttttaattttataatgtttgtaaagattttttttttaaataggttatgtttataggttttggggtggatgtaaattttaggggttattttttatttttttgttgtttttgtgtgtttggatgtatagtatggttttatgttttagattttttgttggatttttttggttttttggggtggtttttggttttttttatttgtttttgtgtttttggtgaggtgttggggttgggtttagtttttgtaggaattttggggatagtatggagttggtaattttttattaggtgtttttttatttgtttagagtttatggttgtgaggggtttttttttgtggttttgatttgtaattttttagtggttagtgatgttgagtatttttttgtgtttattgtttatttgtatatatttttgtagaaatgtttgtttaagttttttatttgtgtttgatttggatgattgttgttgttgagtgttaggagatttgtagattaatatttagatattaattttatatttgatttatgatttgttgttattttatggattgttttttttttatgttgttagtgttttttgatatgtaatttttttttttttttttgagatggagtttgattttgttgtttaggttggagtgtagtggtatgattttggtttattgtaatttttgtttttttggttttagtgatttttttgttttagttttttgagtagttgggattataggtatttgttattatatttagttaatttttgtatttttagtagagatggggttttattgtgttgattaagttggttttgaatttttgattttaagtaatttatttgttttggttttttaaagtgttggagttataggtgtgagttattgtatttaggttgatatgtaaatattttaaatttttatgatgttttattttatttatttgtttttttgttgtttgtgtttttggtgttatatttaagaaattattgttaaatgtaatgttaggaagttttttttttgtgtttttttttaagagttttgtggttttagtttttgagtttaggtttttgatgtaagttgagttgatttttgtatgtggtgtaagggttggtttagttttatgttttgggtttttgatttattttttttttttttttatgtttagttggttttgttgggtggtggggaggagtggggaagttttgggttgggtttgtatttgattatttttttttaggttagttagggagttttagtttttgtttaggatttggttggatgtgttttttattgggaaagtttgggttgtttttttaggttgatggtagggttagtttggggtgttttgaggtttgttttgtggatatgttttttgttttaggtggtgtggttgtttggtttgtgtgtgagattagttgtttgtgttttaggttatggaggttgagtgtttttagtttgtttttttgtttggttttttttttggggaagtttttgtagtttattttttgtttttgtttttgttatttgtgtttttgtttgttttttgtttggaggtggttatttttggggttattttttatgatttggatataagtttttattttgaagttattatttaaatttttgtgttttaaattttttttatttattatatgggtttttattgtgattaatttagtagttgatgaagttttttttggggtttttttagtaatggggagttggtttttttggaggtttggtttttttttaagtggaagtggggtgtgagggtgttagtttttttttgttgtttggtgttttaggttggtttgttatttttggaagtatttgttatttttatatagtattttatatttatttttttgttttttatttttttttttaaggggttatttttgtttttttttttatttaattttatttatgtggtttgtttagtaatttttgatttttaatatgataaaataaattttttttgttggttatttatttatttatttagtattgggtgttttttgtggatttggtgttggggttttgtggaggataaagttagatatagtttttgtttttatgggattgtataagtgtaagattatattagtaaatgtgaaatataggaagtgataggtgtgataaaggggattagtggtaggatagaatttgtggtttgtaggattaggttaggagggttgttttggggggatatttttgggttgagtgtagaaggatgaggggagtaaattaggtttaaatttagtaggtagaggtgattgttgtaggtaattggtaatgtgtttaaaggttttggggtgtggggggttgaggttggtagtatggtaggaagtaagattggggttgaaagagattgattgttatgttgtgaaatatatatttggtttttatttttattttttggtatataatttttaaaatttttggaatttttaaagtgatgtttttttggatgtttatgattgatagattagttggtagttttaggatggtttttagggaagattaggtagaattataaggtttagtattattttgtaatttttaggtaggggagaggggttgaaggttaagtagattattagtggttaatgattgaattaattatgtttttgtaatgaggtttttgtgaatatttagaaggatggggttttgggagtttttggatggatgagtatgtggaggtttttggagggtggagtgtttggggagtatatggaagttttgtgttttttttttatattttgttttatatatttttttttttgtattttttgtaatattttttataataaattagtaaattttatgagttttaggaatatgtgtaaaagaaaaaaaaaagaataaattatagttgttgtagtaagttaattttattagtattggtttttatttgttgattttatttttggtaatgttttttttttttgggtttttgggatttttttggttttattattttttttgtagtggttttgttggttgttgtttttaggttagtttatttttatttggtttgtttttattaggggttgaggtttttttgtttattttagttttttggtttgttttttgttttgggtatttttttattttgaatggttagagtttttgaagttgtttgttgtgtgtttttgtttggttttatgtattttgtatggtgttttttagggttttttattggtaagggtattggtatagattttggggttgttttggtttaagtttattttgatttggagtttgagggtttttgagggggttttgaaggttagggtaggtaaggttggtatgttttgggtagtgggggttgggtatgggaggggattgtgggtggggagattttttttaattagtggtttatgtttggagattgatttgggttttaggttatgttttgaaattgggatagagagtggtgtagattttagtttggagattttttttgtttgtggatgtttttatatttttatttgtggagttatttttttttttttttttttaaatggggaaattttgatttgaatattgaataaataatatatttttgaaattagtgaagaggtattggttttgaaattttgttatgaaagtttgaaaatgttttttggattgatttgttggaatagatgggtgtgatggggttgtggggttttaggtggtaggaggtgtttttgtgtttagggtattttgatgtttagagtttttttgtgtttagtgtgtttttgtatttagggtatttttatgtttagggtgtttttgtgtttagtgtgtttttgtatttagggtatttttatgtttagggtttttttgtgtttagggtgtttttgtatttagagtatttttatgtttagggtgtttttgtatttagggtgtttttgtttttagggtgttttgtgtttagggtgtttttgtgtttagtgtgtttttgtatttagggtgtttttatgtttagggtgtttttatgtttaggtattgtttttttttatttttttaatttttttttattaataggtgttagttgtgaaatgtttgttgtgtgtgttttttggttgagtttattttgtgtttttaagtttttgttagatataggtaggttgttttagtttttttggtaaatgttttgttgttgttgtttgatatggggttttattttgttatttaggttggagtgtagtggtgttattttgttttattgtaatttttgttttttaggtttaagtgatttttttgttttagttttttaaatagttgggatgataggtgtttgttattatgtttggttaatttttgtatttttagtagagatggggttttattatgttggttaggttggttttgattttttgattttaagtgatttatttagtttggttttttaaagtgttgggattataggtatgagttattgtgtttggtttgtttggtgaatgtttattgaggtttattatgtgtagttttttttttaggtgtttggtttgtaatgaggagtaataaagatatagttgttggttgtttgttatttaatagttggaattgagaggtagtttataaatgagtaaatttataggtggttttagatgaggattgtgaagaagttaagaataggttgttgggggtgtatatttgtgtgtgtggtgaggggattaatggaagttttttttgagtggtgatattgagttgaagttgtaatgattagaaggatttagttaggttaaaatttaagggaagagtaatttggtaaaggaaatagtaggtgtgaaggtttgaggttggagtttggggaaggtgggagtggttggagtgtgtttttagagatgggttatggtgatattaatgtgataggtagggttaggttgtgttgggttttggaggttttggtgagggtttgattttatttttattatggtgggattttagtgttttgtggttgttgagaatggttaggggtaggtagggaggtttgttagggaggaggttgttgtaggttttgtagttggagagggaggattaggatttttttagagaggaagttggagagggaggatttttttgattgttggatggatttatttgtttggttgtttttgttagtatttagtagaggttattggatgttgataggtggttggttttgtttagttttgtattgttttgtgttgttttggtggttgttggttttaggaggagtgtttttggtgtttgagtttagtggttttggttgtggtttggtatatttggttgtgggtgaggttaaggtggtttggattttgggaaggttgggtatttggtagttttaaggtaggagttggggtgttggaggaggaagtatgtttattttttgtttttttttgttttgtgggatgttgagtttttgggtagggatatggtgagttttggtgtgatgtatttaatatttgttggtgtttttatttttaagtaggaattttggtgtttggtgtttgaggattgttgtttattgttttattattttttaggtttttttttagtttttgatttggggtaaggtttagatatttagaatatttttggttggtttttggagttggggtgaggtagaattttttttttatatttatagtattagttaaggttttggggtttggatattatttttgggaggggtgagtaggataagtgaggtttttagatttggggtggttttggattggttaggtaggtgggtgggggttgtagtttatgtttttgttttaggtaatatagttgagttgtagtttttgttttatttttagttggggttttttgtgtttattttttgtttttttttttttttttggaatggggggtggatattttaagattagttttttagttattttttttgttttttgtttttttttttttgggatagatttttgtgattgttgggtgtttttgatgttttgttttttttgtgttttgtgttgtgggtgagagagggttttggggggattttttttttttggagtatttgttgttttgggtgtttttgggggtgggtttttattttatattgtggagttggtgtaggaaggaaggtgttgggagttagttttaatttatgtgttggttgtggtttttaaggtgtggatggtaggaggtggtgagatagggatttattgattatgggattgatatttttttatgttgatgtgggttttgagttataattttattagtttttgagttttggtgttgtttttggtgatggtgtggatttagttaggtttttgggtagttttttttggattttttttttgtttttttttgggtagtgtttttgtttatttggaaaggatgggtaggatttggagataatagggatttaaagaagttgggagtgggggtatttgtgtagtttattttgtagaatagataatttggttaaagtttaaagtttgttgttaggagttttgtttgttttttagagagtatatggtttgattattatggggattgggggagaggtataggtatgtttgtttggtagtagaagggaattttgggtttgggtttttttattttgtggtgttgtttttttttagagttgtattgttttttttattgtttttgtttggttttagtgtttatgtggtttgtggtttttagtttgggtttggttttttgtaatttattttgtttagttttatatagtttgtttttttagttgggaattggagtttatttggagttttaggtagtagatttgatgtagtgatgtagggttgttagttatgttagtaggttttgttgtttatagagggatgggtattgttgttgataataattaaagaattatggttttaggttgggtatagtggtttatatttgtaattttagaattttgggaggttgaggtaggagaattaattgaatttaggagttttagattaggttgggtaatatagtaaggttttgtttttataaaaaataaaaaataataataataataaaaattatagttttagaatgattgattttagtatgtttataaagttaagggtttttagtgttttgggtttatgttattgtgttagagggagagaggaagaggttggggtgatgggtattggggtttatgttttttttggaatgggtggttttggattgtgtttgtgtgatatgtttgttgagtgggggtggtgtttattgaggattggatgttgaggtgtgggtggggggaggttatgaagtattgggtattttttgtgtattagtgttttgagattgtagagaggggatttgtttagtttgggtagggaggtgggtggtagtgaggaaggggagaggaatttgggtgtagaaagttttttttttagtaggtggtgttgtaagtttttgagagtttagtttttgtggggtttgtatttttattgaatttgtgggtagaggttgtttgggtgtagtttttgttaattgtgattgtttattgtgggtgaggggaagtggagtgtagagaatgtattggagggtagatgattagtttttgtataggtatgggggtgtttttttttttgtataggtatggggggtttgagtttttggggtttttgttttaattgggtggggaaagggagggttggaagttgagttagggggaaagggggtggttttttgttattttttttattttattttttttatttttggttgataggttttaattttttttatatttttttaattttttgttgtaaaattttttaaatatagaaaagatgaaagagggttgagtgtggtggtttatgattgtaattttagtattttgggaggttgaggtaggaggattatttgagtttaggagtttaagattagtttgggtaatatagtgagattttatttttataaaggatataaaaaattagttaggtatggtggtgtaggtttggagttttagttatttggaaggttgaggtgagaggattgtttgaatttgggaggttgaggttgtagtgagttgggattgtgttaatgtattttagtttgggtgatagaataaaattttgttttaaaaataaaataaaataaaattataaaaaagaaattatgaaagattttaaagtaaatatttatgtatttattatttagattttatagtaattattttgttgtttgttttattataaatttttttggttattagtatttatgttggttttgatgtatttaaaataagttgtagaaattagtatataatattttgttaatattttagtttgtattttattaattagagtttggtatttgtttgtgattatttttgtttttttttgaagtaaaatgtatatattttgagatgtataggtgtgaaatgttttgttttttgaattttaataaaggtatttatgtgtattttagtttgattagaatatagaatattattattattttagtaagttttttatgtttttttaggtgtattatagtttttattttttttagggtaattataattgtgttttttttttattatgaaataattttgttagtttgagtgttttttagagttatttatgttgttgtaggtgttagtgatttgttttgttttattgttgagtaatgtttattgtgtgaatattttgtgggtttttagttatttttttgttgaaagatttttggttgtttttatttggaggtttttatgagtaaatttgttatgttggttttttttgtataagtttttttgtgtatatgggtgtttatttattttgtagaaatatttagagtaggtatagggtaggtatatatttagttttataagaaattgttagatttttttttaaagtggtttttttattttatatttttattagtaatggatatgagttttagttgttttatattttggttaatatttggtgttgttattttgtgaaattttagttattttggtgggtgtgtagtggtattattttattatggttttaatttgttttggtttgatgattaatgtggttgagtatatttttatgattggttttttatatattttttttttgtgaaatgtttttttaaatttgttgtttattttaaaattgggttgtttgatttttttttttggatattgattttttgttagatatgtgttttataaatattttattttagtttgtggtttgtttgtttattttttttttttttttaagaataaggttttgttgtattgtttaagtaggtttgaaatttttgggtttaagttgtttttttgtttttgtttttttaagagttggttttataggtatgagttattatgtttggtttgtttatttttttagtggtattttttaataagtaaaagtgtgttattttaatttttatgaagtttaatttaataaatttttttttttgtggttttttttttgtgttttttgtaagaaatttttgtttattttgttaaattgtaaagatatttatgtttttttttagaaggtttagagttatatagtttttatgaattaatttttgtatatggtgtgaggtagagggttagggtttattttgttgttgttttatgtgtttatttagttgttttaaattttatttttttttaaagtttttattttgtatttttttggtgatttatgaggttgtataattttttaagatttttgttggttatttatgtatttttttttgtaaaattatttgtttatgttttatttttttttaaaattatgttgttttaagattgagtgatttttgaagtttttattttataatgtttgaaagaatgaatattttgttttttagttataggtttttgttttttgttttgtagttgtatagtggggtaagatttgggttttgttttgttgttgttttgttgtttttttatttgattgtttttttatgggttttatttaaaaaaaaaattggttgggtatagtggtttatgtttgtaattttagtattttgggaggttgaggtgggtagattatgaggttaggagattaagattattttggttaatatggtgaaattttatttttattaaaaatataaaaaattagttgggtgtggtggtgggtgtttgtagttttagataattgggaggttgaggtaggaaaatggtgtgaatttgggaggtggagtttgtagtgagttgagattgtattattgtattttagtttaggtgatagagtaagattttgttttaaaaaaaaaaaaaaaaaaaaatgttgttttatatgttttttatatattttggatataagttttttattagatatatgtattataagtttttttttttatattgtttttttttttttggtttttttaatgatgttatttaatgagtaagagtattttgtttttataaagtttaatttattaattttttttagttttgatttatgatttttgtgatttatggaggaaatttttgtttatattaaggttaaaagaagtttttttattttttagaaattttatagttgtatattttatgattttttttattttttaattttttaaatttttatattttttaatttattatagttgttaggatgttgtatgatttattttaaattagtttttgtatttggtttgaggttagggttaatttttgtttttttatatttatatttagttttagtattgtttgttgaaaagatatattttattttattgaattatttgatatttttgttaaaaattattgattgtatatgtggttttatattagtatatgtatgtatatatatgtaggttttgtgttgattgtatgtgtggttttatattagtatatgtatgtatatatatattggttttatgttgattgtatatgtggttttgtattagtatatatatattagttttatattgattgtatatgtggttttgtattagtatatgtatatatatatatgtaggttttatgttgattgtatatgtggttttatattagtatatgtatatttatatatgtaggttttgtgttgattgtatatgtggttttgtattagtatatgtatatatatatatataggttttgtgttgattgtatatgtggttttgtattagtatatgtatatatatatatgtaggttttatgttgattgtatatgtggttttgtattagtatatgtatatatatatatataggttttgtgttgattgtatatgtggttttgtattagtatatgtatatatatatatgtaggttttatgttgattgtatatgtggttttgtattagtatatgtatatatatatatgtaggttttatgttgattgtatatgtagttttatattagtatatgtatatatatatatgtaggttttatgttgattgtatatgtagttttatattagtatatgtatatatatatatgtaggttttatgttgattgtatatgtggttttgtattagtatatgtatatatatatatgtaggttttatgttgattgtatatgtggttttgtattagtatatgtatatatatatatgtaggttttatgttgattgtatatgtggttttgtattagtatatgtatatatatatatgtaggttttatgttgattgtatatgtggttttgtattagtatatgtatatatatatatgtaggttttatgttgattgtatatatatatgtggttttgtattagtatatgtatatatatatatgtaggttttgtgttgattgtatatgtggttttgtattagtatatgtatatatatatatgtaggttttatgttgattgtatatgtggttttatattagtatatgtattgtatatatgtaggttttatgttgattgtatatgtggttttatattagtatatgtattgtatatatgtaggttttgtgttgagatattattgtgtttttttgatattttgtttatttttttgttgatgttatattttgattaatgtggttttatagtaagttttaatataaagttttttaaatatttaaaatattattttgaatattttaggttttttgagtttttttataaatttaagaagtagtttgttgatgtttataaaaatgtagtgtgaattttggttgagattgtgttgaatttgtagattaattaaggaagaattggtattttaataatattgagttttttgtatagatggtatatttttgttttaaaggtttttttgtattttttttatttttttattgaaaaaaaatttttatagaattatattgttttgtagtttttaagaaaaagattttgtatgttatttgttaaatttatttttaagaattttatttttggtattattttaagttgaaatagattttaaattttatttttaattatttgttgttagtatgtaaaaatataatagatttttgtatgtaaattttatattttatgattttttttaaagttatttattattttggtaatggttttgtaggttttttaggatttaaatatatagttttatttttttttgattttgatgttttgttttttttttttgttttattgtattggttagagttgttagtttagtattgaatagtagtgattagtggatatttttgtttgtgttaaatttataatgttaattttagatttgttatatatgatttttgttagattgaggaaatttttttttatttttaatttgttgaaattttttaatatgaatgggtatgattttagtaaatgttttttttgtatttatggaaatgattattgttttgttttttatttgtttaataggataaattataatgattgatttttgttttttgttttttttttttttttttttaaagaaatagagttttatttttgtttaggttgtagtatagtggtgttattgtagtttattgtagtttgaatttttggatttaagtaatttttttattttagttttttaagtagtagggattataggtatatgttattatgttaagttaatttttaatttttaaaattttttgtatagatggggttttattgtgttgtttaggttggtttgtaatttttgagtttaagtaatatttttatttttgttttttaaagtgttgagattataggtgtgagttattgtgtaggtttgattttttaatattgaattaattttgtatttttggaagaagtttaatttgtttatgagatattattttttttatatattgttaaatttgatttgtttagtttttaaggatttttgtgtgttgatttatgagggatattggtgtggtattttttttgtttgttagtttgttttggtaatgtttttgttagttttattttggttttataaaattagtttggaagtgtttttttttttttgttttttgtgtttttataaggttgatgttgttttttttttaaatgtttgatagaatttattaagaaaattgtttggatttagaattttttattaggaaaggtgattgtttgtttttaattataaatttaatttaatgtatagaaagagttatttaggtttttttatttttttttgttttatttttggtaagttgtattttgaaggaatttgttttttttaggtaagttgttgaatttatttatttaaagttgtttgtaatataagtatatttagggtttgtttttagattttggtaataaagtaaatattgtaataaagtatgttatataaattttttggttttttagtatatataaaagttatgtttaggttaggtatggtggtttatgtttgtaattttagttttttgggaggttaaggtgggtggattatttgaggttaggagtttgagaatagtttggttaatatggtgaaattttatttttattagaaatataaaaattagttgggtgtggtggtatatgtttgtagttttagttgtttgggaggttgaggtgggagaattgtttgaatttgggaggtggaggttgtggtgagttgagattatattattgtattttagattgggtgatagggtgagattttattttaaaaaaaaaagaaaaaagttatgtttatattatattatagtttattaaagtgtataagattattatgtttttttgttaaaaaatgttaataattatttgagtttttagtaagttataattttttttttggtagaaggtttgttttaatgttgatggttgttgattaggtggtggttgttgaaagttgaaggtagttgtggtagtagtttttttgttttttttttttttttttttttttttgagatagagttttgttttattgtttaggttggagtgtagtggtatgattttagtttattgtaatttttgttttttgggtttaagtaatttttttgttttagttttttgagtagttgggattataggtgtttgttattatgtttggttaatttttgtatttttagtagagatagggttttattttgttggttaggttggttttaaatttttgattttaggtgatttatttgttttggttttttaaagtgttgggattataggtgtgagttattgtatttggttggtagttttttaattgaagtttttgatatgggttgatttttttttttatgaaagatttttttgtggtatgtattatgtttgatagtattttatttataatagagttttttttaaaattagagttaatttttttaattttggttatggattgattaaataagttgatgtaatattttaaattttttgttgttattttaataatgtttatagtatttttgtttggagtagattttatttttaggaattattttgtttgtttatttataagaagtaattttttatttgtttaagtttgattatgggattgtagtaatttagttttatttttaggttttatttttaattttagttttttgttatttttattatatttgtagtgattttttttgttgaagttttaaattgtttatttatgagggttggaattaattttttttaaatttttgttaatgttgatattttaatttttttttgtgaattataagtgtttttaatggtatttagaatggggaattttttttagaaggtttttaatttattttgtttagatttattagaggaattattaattatggtagatattgttttataaaatatattttttaaataataagatttgaaaattaaatttattttttttttatgggttgtagaatgggtgttatattagtaggtatgaaaataatatttatttttatatatatttttgttagagtttttgggttataaggtgtattgttaatgagtaataatattttgaaaggattttttttttttgagtagtaggttttaatgatttttttttttttttgatggagttttgttgtgttatttagaatggaatgtggtggtatgattttggtttattgtaatttttgttttttgggtttaagtgatttttgtgttttagttttttgagtagttgggattataggtatatattattatgtttggttagtttttgtattttttgtagaaatagggttttattatgttggttaggttggttttgaatttttgattttaggtgatttatttgttttagttttttaaagtattgggattataggtatgagttattgtattgggttttatttgttttttttttgttgttgttttttaattgagatagagttttgttttgttgtttagattggagtgtagtagtgttattttagtttattgtagtttttgttttttaggtttaagtgatttttttgttttagttttttgagtagttgggattgtaggtgtgtattattatgtttggttaatttttgtatttttaatagagatgaggttttattattatgttggttaggttggttttgaatttttgaatttaggtgatttgtttgttttggttttttaaaatgttgggattatagttgtgagttattgtgtttggtttttttttgtttttttgtttttttttaaattgagatagagtttttttttgttgtttaggttggagtatagtggtatgattttggtttattgtaatttttgttttttgggtttaagtggtttttttgttttagttttttaagtagttggaattataggtgtgtgatattatgtttgaataatttttgtatttttagtagagatgtggttttattatgttggttaggttggttttgaatttttgattttaagtgatttttttgttttagtttttaaaagtgttgggattataggtgtgagttgttgtattaggttttaatgggtttttaatatttagtaaattatgttgtaaatagatgtgttgttaagtagggtttgttattttatttttgaagtatagatagaatagatttggtagaatttttaagggttttaggatttttggaatggttaatgagtattggttttaatttatggttaatagttgtgttagttttttatgagagttagtttgttttttgaagttttaaagataggtattgattttttttttttagttatgaaaattttagatgatatttttttttagtagaaggtgggatatttatgttgaaattttgttgtttagtgtagttatttttattagtgttttgagttagattttttgggtaatttgttgttgtttttttattagtatttgttgttttattttgtatttttatattatagagatggtttttttttttaaattttatgatttgatttttgttagttttaaattttttttttttagtttttttattttttttagtttttatattattgaagagagttagggttttgttttggattaggtttttgtttaagggaatgttgtggttgatttgattttttatttagattatttaaattttttttatattagtattaaggttgttttgttttttttttttttatgtgtgtattggaattgtatttttaattttttttaataatttttttttggtatttataatttggttagttatttggtataagagattttatttttgtttgttttggtttttgatatgttttttttatttagtttaattatttttagtttttgatttaaagtgagagatgggtgatttttttttttatttgaatatttagaggttattgtagggttattaattggtttaattttaatattgttgagttttagggaatagggatgtttgagtagagggagagagagtggggaatagttagttagtggagtagttagaatatataatgtttattgaataagtttattgttttatttggatgtggtttgttatgttttaaaaataattgtaataatggtattgaagattattgattattgggtgtggtggtttatgtttgtaattttagtattttgggaggttgaggtaggtggattatttgaggttaggagtttgagattagtttggttaatatggtgaaattttgtttttattaaaaatattaaaattagttaggtgtggtggtgggtgtttgtagttttagttattggggaagttggggtagaagagttgtttgaatttgggaggtggaggttgtagtgagttgagattatattattgtattttattgtattttagtttgggtaatagagtgagattttattttaaaaaaaaaaaaaaagggttgggtgtagtggtttatgtttgtaattttagtattttgggaggttgaggtgggtagattatgaggttaggggattgagattattttggttaatatgatgaaattttgtttttattaaagatatgaaaaaaatagttgggtgtggtggtgggtgtttgtagttttagttatttgggaggttgaggtaggagaatggtgtgaatttgggaggtggagtttgtagtgagttgagattgtgttgttgtattttagatagagtaagattttgttttaaaaaaaaaaaaataaagaaagaaaaaagaaaaaagagattatagattattatagtagatataataataatgaaaaagtttgaattattttaagaattattaaatttttatatagagatatagtgttaatatgttgttggaaaaatggtgttagtagatttatttgatgtagggttgttatgaatttttaatttgtaaaaagtgtagtatttgtgaagtataatgaaatgaggtgtgtttgtgttttttgttattgtaatgttggtaggatttgtaaggaaaatattttattttttttattgtgattttatgtttgttattttttttttattagtagtttggttaggaggttattaatttagatttttttaaagaattagtattggattttttttttttggtgtttatttttttgagtttttttgttatttttattatttttttttttgtatttgttttagtgtattagttagggtttagttaggaaataaaaattatattggtaatttgaatagtaatttgtaatataaagtgtttttaattgtaagaggtagttaattattaaagggattataaaggggtgatattgtgatataagaaagatgtatttgggttgggtttggtgtagtggtttatgtttgtaattttagtattttgggaggttgaggtaggtggattttttgagtttaggagtttgagattagtttgggtaatatggtgaaattttatgtttattaaaaatataaaaaattattttggtgtggtggtgtgtgtttgtggttttagttatttgggaggttgaggtgagaggatagtttgagtttgggaaggtagatgttgtggtgagttgagattgtattattgtattttagtttggatgatagagggagattttgttttaaaaattaatgtatttgtttgtttgtttgtttatttatttatttatttatttatttatttatttatttagtttttgttttttaattttgtttggtatgtagtttttaaaatttttgaaatttttaaagtgatgggtgtttttttgtttgttaaggaggtgattggtggttggaggtttttggatagtttggggataagggttggttgttaggggatttagttttgtgattagaaggttagaatttgtagttttttttatttattttttgtgaggtaagaggggatgaaggttgagttgattattaatggttaaagattttatgttatgtttatgtagtgaagtttttttgaaaatttaaaaggatgaggtttgtagagttttaggttgttgaatatttgtaggtgttgggagggtagtgtatttttttgtggaagttttatgttgttttttttatattttttttatgtattttttttagttggttgtttatttgtattttttgaaatattatttgtaataagttagtaattttaagtaaattgattttttgggttttgtgagttatttaagtaaattattgaatttgagaagggagttgtgaagattttaaatttgtagttaagttagatagaagttatgggtaatttggtgttttattatttgtgattgatttttgaagttgagggtagttttgtgagatggaatttttaatttatgggatttgtattaattttggttggtgttagaattgaattgaattgtaggatatttagttggggattgttgagtattggagaattgtttgggggttggtgggaggaaattatatatttggtgttagagttgaagtattgagtgttgtgaatgagagtggagagatagagtttgttttgttttatgtaagaggattttaaggagtatagaaagagtaaatatgagaagtagttattttagaagaaaatataggaggaaagttttgtgatattggagttggtaatgtttttttggatgtgatattgaaaatataataaaagaaataaatgataaattggattttattaaaatttaaaatttttgtgtattaaggaatattattaatggtgtgaaaaggaaatttatagaatggaagaaagtatttgaaaattgtatatttgataaaggattagtatttagaatatataaagaatttttataattaagttataaaataaaaaaaaataatttagtgaatagatatttttttatagaagatatattaatggttaagaagtataggaagagatgtgtagtgttattaattattagggaaatgaaaattaaagttataataaaatatgattttatattttttaaggtggttgttagttaaaatatggataatagtaagtgttggtaaggatatggagaaattggagttttgtgtattgttggtgggaatgtaaaatggtgtagttgttgtggaaaagatataataattgtttaaaaaattaaatttagaatgattataatatttagtgattttatttttagatgtatattttaaagaattgatagtagggatttgaataggtgtgttatatttttgtttgtagtagtattttttttataattaaaagatgtaggtaatttaggtgtttattagtggatgaatgaatagataaaatgtggtttatttgtatagtggaatattattttgttttaaaaaggaaggagaggttaggtgtggtggtttatgtttgtaattttagtgttttggaaggttgaggtgggtagattatttgaggttaggagtttgagattagtttggttagtatggtgaaattttgtttttgttaaaaatataaaaattagttaggtatgggggtatgtgtttgtaattttagttattagggaggttgaggtaggagaattgtttgaattagggaggtggaggttgtagtgagttgagattatgttattgtattttagtttgggtgatagagtaagattgttttaaaaaaaaaaaaaaaaaaaaaaaaaaaggagattttgatatatgttatagtatagatgagttttgaagatatgttaagtgatagaagttagatatgaaaagataaatattgtatgattttatttttatgaggtttttagagtagttaaatttagagagatagaaagtgggatggaggttgttagaggttgggggaagggagaatgaatgggaagttggtgtttaatggggatagaattgtagtttgggaagatgagatggatggtggtgatggttatataatagtgtgaatgtgttttatgttattaaattgtatatttgaaaatggttaaaatggtaaattttttgtgatggatattttaaggtatgtatgtaaatatatagaagtagttattattattggggttgatggaaaagaaattaagaatttggagtgttttttatattttgttatgttttatgtttaggttttgttggagagtgtgtgattgttatagaaatttgtagtttattggtaataaaaaggtttttgttagaaggtgtagaaagagtggatttgtaggattagtttattgggtagttgagaaatttattagagggtatgggtgggtaggagttgggtgtttgagaagtttgttgaggttttattgggttagagttggggtgttggagaaatttagtatagagtaggttttattgggtatatgttattggtagttgtgtttttagaggaaaaagagattttggaattaggaagagaagttgttattttagtaaggtttggtagttttttatagtgttgttttttgtggatagagtttgatatgattgtatttggttaaggagaaagatttataaggttttggtttagtattatggagtggggtttggtaggatgtatgtagagttaagaggtaatatatgggtaattggtatatttttttagattttttgttttttttgttgttttgttttgttttgttttgttttgttttgttttgagagagtattttgttttgttgtttaggttggagtgtagtggtatgatttaggtttattgtaatttttattttttgggtttaagttatttttttgttttagttttttaagtagttggagatgtttattatgtttagttaatttttgtatttttagtagagatagggttttattatgttggttaggttggttttgaatttttgattttaggtgatttatttgttttggttttttaaagtgttgggattataggtgtgagttatattgtatttggtttatttttttagatttttaaagtagatttttaggtttttttttttttttttttttttttttttttattttttttttaatataagtatttatagtttttttttaagtattagttttagtttatgtattttagtatgttgtgtttttattattattttatttgaaatattgtaaaattttttttgtgattttttttttgatttatgggttatttagaagtatgttgtttaatttgtaaatagttaaggtttttttgagtattttagagttattgatttttaatttaattttattttggttagataagtatattttgtatgtttttaaaatttgagatttatggtttagaatgtgtattttggtgaatgtattgtttttatttgagaaaaaaatatgtatatatattttagattttttgagtatagagttttataattgttgattaggttaattgttagttattagtgttttttagattatttgatgtttgttttttagatgttgagagaatggtgtttgttatggtttatttgtttgtgttttttaaaatttatatgttggagtttaatttttggtgtagtggtgttgggaattggggtattagggaagtattggtttatgagggtagagttattgtgaatgggattagttttttttgttatgtggggatatagtaggaaaaggatatttttgaagtagggagttagtttttattagatattgagtattttgattttggattttttagtttttagaattgtgagtattataatttgtttataaattatttagtttaaggtattttgttttaatattttgaatgaattgaggtggtgttaaaatttttaattatgtatttaggtgtagtggtttatatttgtaattttagtattttaggaggttaaggtgggtggattatttgaggttaggagtttgagattagtttggataatatggtgaaattttgtttttattaaaaatataaaaattagttgggtgtggtggtaggtttttgtaattttagttatttgggaggttgaggtaggagaattgtttgaatttaggaggtggaggttgtagtgagttgagattgtattattgtattttagtttgggtaataagagtgaaattttgttttaaaaaaaaaaaaaaagagtttttatttatgattgtggaattgtttatttttttttttaatttttttaggttttatattatgtattttgaagtttttttggttaggtgtatatatatttatgattataatggtgttttgatgaattgattatttaattatgatgaatgtatttttttattttgtaataattttattttggatttaattttattgatatttatgtagtttttttagtttttttaaatatgttgtttgggatgtataagaaggttggagaggtttatggagaaatttatgatggtttgatttatagttttttaattttattatggtgtgaatgtggtatgtatatagtagaaattgtattttaagtatgtgtgaaattattgtgttttttatttttagtatagtatttaataatttatatgagatagttaatattttattataaaataggttttgtgtttgttgattttgtttaattgtaggttgaagtaagtgttttaattatgttaaggtaggttaggttaagttagaatgtttggtaagttagatgtattaagtgtatttttgagatgatatttattttttatttatgatgggtttgttaagatataattttattattatttaagtagtattagtatgtttttttttaaatagaaaattttaatttgtgtttatattgaaatagtattttttgtagatagtatatagttgagttttgttattttatttattttgatagtttttgttttttaattggaatatttaggttatttttgtttaatatagttatagatatgattgggtttagagttattattttgttttttgatatttattttttttattttgtttttttggttttttttatgttaattaagtattttttagaattttattttaatttatgttttttttttttttttttttttaagatagagttttattttgttgtttaggttggagtgtaatagtatgattttggtttattgtaatttttgttttttgggtttaagtgatttttttgttttagtttttttagtatattgggattatagatgtttgttattatggttggttaatttttgtatttttagtaaagatggggttttattatgttggttaggttggttttgaatttttgattttaggtgatttgtttattttggttttttaaagtgttgggattataagtgtgagttattgagtttggtttgttttgattttttaattgtatttttttgtattgttattttagtagttattttatagattttattgtatatttttagttttttatagtttatttagaattaatattgtttttttttatggaaaaaaagtgtaagaattaggtaattttatgggtttatttattattttttattttgtatgtgatggttgttagatatttattatatttatatatattgtaaattagataatataataaggaaatttttgttttaaatagttttatgtattttaaagaaattaaaagtaaaatagaattttttttatttgtttatgtatttgttatattttgtgttttttatttttttttgaagagttgagtttttatttggttttattttttatgattttggagaatttgttttatggtttttgtagtgtaggtttgtagatagttaatttttttttatttttatttatttgtaaatttttattttgttgttattttttttttttttatttttatttttatttttgagatagagttttattttgtttttttataggttatagtgtaatggtgtgattttaaaatttttgtttaattttaatttattaattttttttttttgggtttaaatgatttttttgttttagttttttaagtagttgggattataggtatgtgttattatatttagttaatttttgtatttttagtagagatgggattttattatgatggttaggttggttttgaatttttgattttaagtgatttgtttgttttggttttttaaaatgttgggattataggtgtgagttattgtgtttagtttgttgttatttttgaattataattttattggttatagaattttgagttgttagtttttttttttaggattttaaaatatagggttttagtgtttttggtttttgttgtttttgttaaggaattagtatttatttagttatttttttgtagattatatgttgtttttttttggatgtttttaagattttttatttaagtttgattgtttagtatttatttttgggtaaaaaagtttttagaaattagaaatttatttagttttatttttttttgttaggtgtagattttattttagtttttatttatttgagatattttatattgattttaggttgttgttattttgtttttttaaatattttgtttagagttataatgttttttgtagaattgattagatagtagttattttttgtgattaggagttttgattttttagatttgttgatgggtttataaagtttttgtttgtggtttttagttggtagtggtttttttgttttgaagttgttatgagtgtgtaaaatttataggtttaattttttttattagtatagtttagaaaagtggaatttttggtttgggtggttatggtgttttagattattggttagattagggtggtgattgttagttggttgaatgtggggtttttagtttagtatttttggattttattttaggagttatggttgttttagggttaggggtttggttttagtttttgtttttttttttttttttttaagttgtttagtattaggttttaattagtattttttgtagatagggtgggttggttttttattagaggggtagggttgggtgggaagtttgttgagtttttttttttgtgtagtttatagttttggggttagttttagaggggtgtagaaaggagtttttaaaggtagaaatttatttttttttttgtttttgtgtttttagggataaaggagaggtggttttagttggggggttattagtggtatgtaggaggtttatatgattattgtttgttggggtttttttttttttgtgagagagatgagagagaggagagagagtgtgagttagggtagtgtttttttttagtaatgtagatttttgtatgtgttttttaggagaaattttgttatttgttagagttttagatttggaagaagttttgtttttttttttttttttagtgtagtgtgtgtgtgtgtgtgtgtgtgtgtgtttttatatgtattatatttttttatagaggaaataatttttgtttaagtgtaaaggttgggattggagtaggtagtatgtgggttaaaggagtagagaggaggaaatgggggtgggggtgagggtgggaataggaggtgggtagatgttatgaggtatgttttttataattagaagggttggtggagatgattagaatgttttagatagattttttattaaatttttaaaatttaattttgttttatgaagtttgaggattttgtagagtgaaagataaggaagggtttttttgtaggggggtgtgtgtgtttgtgtgtgtttgtgtgttgtgtgtttttatgtgtgtgtatgtgtggatttgtgtggtgtgtgtttgtatatgtgtgtatgtgtggatttgtgtggtgtgtgttgagtgtgtatatgtgtgtgtttgtgtgttgtgtatgtatttgtatatgtgtatatagattttattttttttttttttggtttattaagtgttagaaagaatttttgtgagtttttttattttttttaaggttgtatatggagggatttgtgtaggtatatgtgtgtgtgtatataatatatatatatatatatatatatatatatatatatatatatgagttaggggtgagtatttttgtggattgtatttaggtttggtaggaaattgggttttgggaaattgtaggttttatttttggtagaaaattatgtttttgttgttgtttgttgaagggaatattaagtggggttggggatagtttatgttgagaagagtaaattttgtttatggtattggggatattgagtggtttttgttttgggttttggagggtttgggagatatgtttgtagttttgggtattttttaaggttatgggtggttatatttaaggttaggtttttttttgtgtgagttgtggttagtaggaaggttgattttagaggtggttttagggtttttggaggttttgtttttgagatatgggttaaggttagagagttgagaaggttgttgttgaggattttggttggtgtttagtttagtggttttttaggtgggttttgtgtaggggttgatgaagttagttgggaaatttgtgaaataaagtataggttttttaggtttgtttagagttttggtattagatgaggtgtagagaagggaattgagttgttaagtgtgaataggagagaggagttttaggattatataggggttttgatatggtaggtgtttggttagtagtggtgttgtttttattgttggatgtgggaaaatgtattgatatttgttgattagagttggggtgagtatttgggtgattttgtagatgagataaaataagggttgttgtgggggaggggtttttgttgggttattttgttgaggttttgtgttattgttttgtggttgttataataaaggattataaatgaggtgatttaaaatatttgaaattggttatgtgtggtggtttatgtttgtaattttagtattttgggaggttgaggtggttggattatgaggttaggagattgagattattttggttaatatggtgaaattttgtttttattaaaaatataaaaaaaaaaaaaaaattagttgggtgtggtggtgggtgtttgtagttttagttgtttaggaggttgaggtaggagaatggtatgaattttggaggtggaggttgtagtgagttgagattgtgttattgtattttagtttgggtgatagagtaagattttgttttaaaaataaaaataaaaataaaaataaaaatatttgaaatgttttttttaaagtttttggagttagaaattttagattgaggtgtttgaaggtttattttttttgggggttttgagggagattgttttatgtttttttttgagttttgtggtggttagtaatttttggtattttttggtttgtagtttggtttattttttatttggtttttattttgtgtttttttttgtgtttttgtttaaattgttttttttgttgtttttttaatttatttttagggataggtttttattttgttttttaggttggagtgtagtggtgtgattatggtttattgtagttttagttttttaggtttaagtaatttttttattttagttttttaagtagttgggatataggtgtatgttattatgtttggttaattttttaatttttttgtagagatgagggtttaggttggttttaaatttttgtgtttaggtaatgagattttgttttttaaaatattgggattagagatatgagttgttgtgtttagtttatttttgttttataaagatatttgttattggatttagggtttattttgatttaatatgtttttaaataatttaattatatttttaaagattttatgtttatataaagttatatttataggtattggggggttaggatttgtatatgttttttgggggaatataatttaatttataatgggttttatttatagaatgaatggtttttttagggtgtgtgtaggtgggtgaggggtttaggagagggatttgtgtggtaagagggtttgtgtttatgttagagattttagaaggagattggatggggtggttgtatggagtaaggggttatagttattgtttttaagtagttggtgggttgtttggtagaaagggagtatttattttgagtttttttaagatatgaagttagtattaggtatttggaaggtgttagtgagtagagtttgattttttatagaaagaggtgttttttttataatgtttatttgaggatggtggaataggttattttataaggtagtgagttttttatgtttggaagtatttaagtaggggttatgtgggagttgtttaggagtgtatagaagggattttagaggtttttgttaatattatttttgtttgttttattttatgataatttgaattttagaatgtaatgttattggggatatgtttattagaggggtttttagtattaggttttatatattatgtattatttttagggtagggaatgagagtaggttttattttttttggttgtttgtgaggattaggaggtttgttgttgaggtagttttttgtggaaatagtgttttagttttgtaatttatttattggagttttaatattttaatgaaatattgtgttagatgggttttgggtatgtgtgtgtagattgttataagtttatgagaatgtatatatgtatattgtatgtgtgtgtatatatgtatgtatatatgtataagaatatgaagatttgaggtaggtatagtttgtgagatagatttttttaggttgaaagattttttataagggtttttagaataaggttttagttttggtagttttttttatttttggtgggaggatttttatagagaagaagggttaagaagtatagtttttgatgtttatggtgtattaagttttgttttaagtttgtgttttattttttatttatttagtaaatttgttgtttttgttttgtgttagatgttgtttttagtattttataaatattgatgtatgtttgttttatgataattttgtgaagtaggtagtgttattttgttttatagatgaggaaataggtgtagagggataaagggatttgtttaaggtttgtttttattttatatgtatatgaatgtttatttatgtggtaggtgttagtttttttttgatgtgagttaggttttgagttggttggggtttgggttttattttggttgtgttttgttgtgggtattaaggaagtttttagtagttttatttttttggtatgatttagttttagggattggatttttttaaatgtttttgtttagtttggagttttttttttagttgggggagggttgaatgattttttatttttggaggttgttggagttttttttgtttgtatgtggttgttgttgggtggataggtttgtttgtgggttgaggtttttagtagttggggtggattatttttttttttaagaagttttgggagaagtagttgagggggttagtgtttttttgaggttaattttttgttttttttagtgtaggtgtgaagttatttttgtttgtgtgtttgttatagatagtggagggtggtgtaattgtgatgtttgtttgttgtattttgtgtttttgaggatgttgatttttggttggtgttgggtgtttgttttttagttattttgttttgatttggtgtggtaggtttgagtattgtttttttataaggaaataggtttagaggttttgagttatttgtttgggtttttttagttaataattggttgagttaggatttttatttagttttgtgattttagaagtttaagttttttttattatgttagggttaggaaaggattagaatgtttttttatgtgttgattatttggatgatttgtgtagtttagtttgttgtagttgtttaataaaaatgtggaatgaatgggtttatatgttttattgtgtgatttagagttaatgattttggttgatttttttgtttttattttgtggtttagtatttttttttggggtgtgtgattttggaagtagtgattttttttattttattttgaatggtgtttgtgttgtagtaggggagtagttggggattgttagtgtttgttgttggtgggttgtgtgttagattttgttttggatgtgtgggtgattgttagttatatgtgtgtgaagggttgtgtgtgtaggatttgtgtaaatgtgtttttttttgttgttagtttatgggaggttgttaagattttgtttttgtatattagtttatattttttttgtggtttattgttgtggttgtttttttgtgttatgtggttgtaggtatagtttttaagtggatggggattgtgggttgaatgtgtattagatgtttttgttttttggtgggtggagatttttaatttatgtattgtggttgttgtatttgaaaggttttttatggtgaaggatttggatttgagtaattttttgtagaggttttagaagtgttttttggttgggtgtggtggtttatatttgtaattttagtattttgggaggttgaggtgggtggattataaggttaggagattgagattattttggttaatatggtgaaattttgtttttattaaaaatataaaaaattagttgggtgtggtggtgggtgtttgtagttttagttatttgggaggttgaggtaggagaatggtgtgaatttaggaggtggagtttgtagtgagttgagattgtgttattgtattttagtttgggtgatagagtgagattttgttttaaaaaaaaaaaaaaaatgaagtgtttttagtttttttttttgtggtgaggttttgagtttttatttttagaagaaaatttggttggggagggtatttttagatttggatataaatgttaggagattagggttgtttttttaggtgattaattatagagatttagggaaagttatgtttggaagaggtgatattgtgttttagttttatttatttttttattttatagatattgtttggtgtttagtttgtattgtgaggttttttaagtagttttgggtattgtgtatttggtatggtttttagttttatttttttgttttgggagatttggtggggattttgggttgagtttttgtggttgtggaattttggtggtttattgtggtggttgagaatagggatgtggggttggatgggttgagtgtaatttttagtggttttgtgaattgtttgggagttttgggtagtttttttttattttgtgtttttgttttttgatggaaaaatgggggttaggggggagtgattttgaaggtatttgtgggaattaagtgaggtgataaatgtagtgtttttggtagagaattggatatagagtttatttttatgaagggggttgttttttttttttttatgtttttttttgtttttatttttttttttgtattttttttttttgtttttttttttttttttttttttttttatatgtaggtatattttatttggtgttttaattgtttttttttattgtttttttgtaagtggttttttaagtgggaatttaggtttggaaagggtgggtattttgtttggtgggttttggtaggttaggtgttgagtagttttaggagatataattttaggaaaaggtttatgtaggttggttgttatgatggattgttggtgggagaggggaaggtgttgtggtaggggaagttttggaaatatttattagtggttttatttatgatttaggatatttgttaggttattagaatatagttgaggaagttgttggttagatgtttagaagtattaatttggtggttgggttgtggggggatttttttggataggtagataaggtgttggaggaaggggttgatatttatttagtgtttgttatgtattgagggtataaagggtaggatggagagttggtttatgttatttgtggaattttttaggtgtgggggtagatggggaagtaagggggtttgaagatatatgtgtttattaaatgtttttaaattttaagaagaagaataaggatatatttataggggtagggttgaaagtttgatgtatggtgttttggggtttgtttttgttgtaatagttatagtggtttttttttattttttttttttttttattttgttgtgaaaatgtttaaaatatatggttaagttgaaagtattttatagggaatatatttagttattatttagattttattattaatattaagttatatttgttttattattttattgtttatttattttttttttgtttggttatgaatttattttatttttattttttggtgtattttaaagtaattttaggttattttgattatttttggaattattgttagaaatttttttttttttttttttttttttttttttttttttttttgagatgggattttgttaggttatttaggttgaagtgtggtggtgtagttatagtatattgtagtttttaatttttgagtttaagtaatttttttgttttagttttttgagtagttgggattgtaggtatttattattatatttagttttatttttaaaattttttattaattttttattttttgtatttatttaggattattttttataaagttagggtgttgtaggaggggttagaattttaagttttaattttggttttgttattaatattgtgtgatttttagtaaattattttgtttgtttaggttttgtttttatttttatgaaatgagggtgttaaattgtatgttataaataatgagggttattagttattaagtttttattttaggttaggtattttttatatgttattatgagtttttttaatttaggtattgtttttaatggatagtttagttaatggaagtttagagaggtggtgtaatttgttaaaagttttattatttagtgaatgtttttatggggtttgtatttaggagtttgatatagagtttaggttttagtatttggtgatgttttgggggtgtgagtagtttagtttattttgggtatgtgtttatttgttgttttttttgttttatgtttgtgtttgttttttttgaagtttagattgttattttttagttttaaatattaaaattggttaggtatggtggtttatgtttgtaattttagtattttgggagattaaggtgggtggattatttgaagttaggagtttaagattagtttggttaatatggtaaaattttatttttataaaaaatataaaaattagttagatatggtggtgtgtatttgtagttttagttatttaaggagaatttagttatttagttattgaggtatgagaattatttaaatttgggaggtggaggttgtagtgagttgagattgtattatttttttttaggttaggtaataagtgtgagattttgttttaaaaataataaataaataaaataaaataaaaattaaaattaaatgttaaaattaatttataaaataaattttggttaaagtagtttgtttattttgttttaattatgtatattgtattagattttgttaggggtttagtgtataaagatgagatttttgttttgttagataggtgggatgatggttatattttgagttagttaaggtattatttggttgtgtaataaaagttaaaatattagaggttgagtagtatttggatttatgttttagtttaagtgttagttgttatgggggtttaggatagtttggatttagtttatttttttggtgtatttttgatatatagtttttattttttgagttgagatggttttagtttttgttgttatgtttgtattttagttagagggaagggaagaagggagaggggaaagggtaagtgtttttttttatttttaagggtatgatttgaaagttaaatattttagtttttttttattggttagaatttagttgtatggttgtttttgttattagggaggttgagtaatgtattttttagttgggtttttttgtgtataattaaaattttagttattatagaaaaaagggagtttagatattggggaaataattagtatttgtattatatgtattgatagttttttttgtatgaatagagttgtggtaggttttatgttagggagaaagtaagattggaaaagagtttattaaggaggtggtatttgtattgtgtttaaggggtaagaaaaatgttttttaattaggagttataaatgtttggttgaagtgttattgtttttttattttggagttggaatagatgttattagttaattatgatggttgttgggtgtattggttaatatttataattttagtattttgtgaggttgagggtgggaagattgtttggggttaggagtttgagattagtttgggtaaattgtaagattttgtttttgtaaaaaaatataaaatgtagttgagtgtggtggtatttgtagatttagttttagttatttgagaggttgagatgggaggattgtttgggtttaggagtttgaggttgtagtgagttatgattgtattattgtattttagtttgggtgatagagtaggatttgtttttaaaaataataaaataaaattaaagttttaaaatggaaaaaaaattatgagtatataattttagatgtatttttaagatagtaaatttgggtgggtgtagtggtttatgtttgtaattttggtattttgggaggttaaggtgggtggattatttgaggttaggagtttgagattagtttggttaatagttttatttgtattataaatataaaattagttgggtatggtggtgggtatttgtgattttagttatttggaaggttgaggtaggagaattgtttgaatttaggaggtggaggttgtagtgagttaagattatattattgtattttagtttggagaaaaaaagtaaaattttgttttaaaaaaaaaaaaaaaaagtaaatttagggttaggtttgtagttatatggttatttttttttttgagtatggaggtagttttagaaatttgttttatattatattagtgggtagttgattgggttagtttgttagttgaattttatttgttatagttattttttatagtaaggggtattttagatatatttttttttttagggaagaataagttgtagttgtttgagtgttttatttagtggtgtgtatgtttttttttaattttgtgtttagtgatgttttgtttgtagtttgaaatttgttatagtgggtgtgtttatattataggaattggtaaatattatatattaggttttattttttgttttttattagggtaggttgttttttttttgttgtttttgttttttgtttttttttttttttgagatggagttttgttttgttgtttaggttggtgtggagtgatgtgatttttgtttattgtaagttttgtttttttggtttatattatttttttgtttgagtttttagaatagttgggattataggtgtttgttattatatttggttaattttttgtatttttagtagagatggggttttattgtgttagttaggatggttttgattttttgattttgtaatttgttttttttggttttttaaaatgttggtattatgttattgtgtttggtttagggtaggttgttagaaatgtattagtttgttagttttagttttgtttgttttttattttttttttttttttttttttttttgagatggggtttttttttgttgttttttaggttggagtgtagtggtgtgattttggtttattgtaatttttgttttttgggattaagtgatttttttgttttagttttttaagtagttgggattataggtgtttattattatgtttagttaaattttgtatttttagtagagatggggttttattatattggttaggttggtattgaattttttatttaaggtgatttatttgttttggttttttaaagtgttgggattataggtgtgagttattgtattgggttttttttgtttttttttaatgaaaatttttttgaaagatttgtttattgatgtttgtgttaataggtattgtttgtgggatagagtttgttttttttttgaaggtttttttttgtttgggtgattatttgtatgttattttttgttgtttagaattaaagatgtagttatgtttggggtaggttgggaaaatttgtgggaattatagagtttgttgttatgttgtgttttggatatttgaagtttggtaggtaggtgggattgagggtgggtattaggaaagtgatgtggttttataggaaggggatataggttttgagattttaggtttttaattggataaagttgttttttttttttggataaatgttttagtttatttataattgagtggttagtttttttttttttttttttttttttttttttgagatggagttttgtttttttgtttaggttggagtgtagtggtgttattttggtttattgtaagttttgttttttaggtttatgttatttttttgttttagtttttggagtagttgggattataggtgtttgttattgtgtttggttaattttttgtatttttagtagagatagggttttattgtgttagttaggatggttttgattttttgattttgtgatttgtttgttttggttttttaaagtgttgggattataggtgtgagttattgtgtttggttaagtggttagtttttttagttgttgggttttgtatattttgttggttttggagattatatgtattatgtagattttatttgttttttatttttagtgttgggggaggggttaagggtttgttgatgtgttgatatttggttatttattggttttgaatgtttatatttatttttttgaaattgatgttttgtattggaggttttatgtggatttgggggtagaggtttgtattttagatggtggggtggtttttattaattaggtagattttttgttttgttttgttttttgggttttgtagttttagatgtgtgtttaagatttgtggttatatggatgggataagttatagagatttagattttgtggtttttgtgattagagtagttgtggttttgtttgggaatgtttttattttgttgttgaaggtgagaaatttttttgtgttggagaatagttgtgttgagaagttggtttatttggtttgtaggattgttggggtaagggaggtttgttgttggttttttttttttttttttgattgggtgttttttgtttaggttttttgtagtaaaagaattttttaatttattttgtttttttattgagtttttattttatgaagtttattttttaattttagttgattggtttttatttttttaagaggaaggttaggggtagatgaggttgaaggaggttgatttttttgtgtttttgtagtttgagttgatgttgttgtatgtttatagggtttttttagtttttaaaaaggttttaatatgtttgttatatgtttgtggtttttttggatgttatattaatttagtaaggtttgagttagaggttgtttttgaggttgtgaaaatagaagaagggtttagaggagaatttttttatttgatgattttaggaaggttttttagaagaagtagtttttgagttgagatttgaagatagattaggtttgagttaggttagggagggtgtgaggggtttattaggtagagggaataggatagggtaggtatagaggtttggtatttggtttgtggggaagtgtgagtttttgggtatgattaaggtggggagaagtggtgtgagaggaggtagatgtggttggtaggagattggtggttttggttttgttgagttttattttgtatgtattaggtgatagaggttgtttaggatggtgggtagggaagtgataggttatatggttattttattaatagttgggagtttagtttggggggatttaagattttggggaaggtatgagttaggggtttgttagagttaggagttagtgggagaaggaaatagtgttgtttatgaattataaatagatatttttgtaattttttttgatgtgatataattttaaagtgggttatttagaggtgggaaggtgatttttggttttttaggttttgggtttgttttttttttttttttttttttttttttgagatggagttttattttgttgtttaggttggagtgtagtggtgtaattttggtttattattatttttgttttttgtgtttaagtaatttttttgttttagttttttgagtagttgggattataggtatttgttattatatttggttaatttttgtatttttagtagagatggtgttttattatgttggttaggttggttttgaatttttgattttaggtgatttgtttattttggttttttaaagtgttgggattataggtatgagttattgtgtttagttgagtttatttttaagttttttttggtttttagtgtttttgtattagtttatttttttggttttttgtttttaagagttttttttaagattgtttttaagtggataggtttttagaattaaggagtagttttaggagtttttagttatagatattttagggggtttgtgtggtttttagtttttggtttggttttggtagttttggttttttgtgttgttttttatatagtttggttagagttggttaggttttttggttgggttgagttattgtggttagtgatttatgtagggggagaaaagtgaggagggggaatagagtgtgagggggattgtgttaataataaatttattaggtttttgaggttattttataggagggataaatggtttatttaggttgatttggttgttggttggtttttagagatatttagggtggggaagattttattatttggggaaagtaatattagattgtttggaggggtttagttagtgtattttgtgttttttgtttgttttttatgtagagtgttttgtttttaaggtggtaggttaagagtgtgagttgaggtttaggtgtaaagaggggtgtggtatgggggtattgtagggtatggggtgtatgtatttttatttatttttttattgagtgttagggtaatttgttaatggggtatatttggtgatataaaattttttgttgatttatggtagtttggaatggagtggaagtgttttatttttggggaatttttatatatatttggttgtgaatgttggtgtttttgtattggagtttttttggagtgtgttgggtagagtggagaggtttttttttttttttttttattattttgtggaggtgttaatatgtagttagagatggttagtggtagtgaggagaggggggtaggaagagattagggttgggggtttgttagtttatagttttatttttgaatatttatggtttttttgtttaggttagtgaggttgggggtagagatgggtaggggttttttaatgttgggtatttttttgtttttttatattttggatttgttttttggagaaagttttggagtatttagaagttttggggttgttggttgaggtggggagtagagtttagttgtgtttggaggttttttatttttatttagtttttagggatagttttagttgtgtaggtttaggttgttgaggttggttttagaaatttttttataattattattggatggaaaattagttttttaaagggttttagagttagttttgtttttttttttataggtttttatagttagagtattgggtttttgttagagatgtagaagagatgatgtttttagtttttatgtggtttggtttttattgtggatgttggtgattttagttttttttttaaaattaagagggttgatgttttatattttaggtttttagaaagagttgttatttatttatattgttatattttttttttatttttttgttttggaaagagtagagtggatatgtgtttttgtagaaatttatttatagtttgattgtagatgtattttgtttttttattgagtttttgttttatgaagtttgttttgtttgtattttttttttttttttttttttttttttttttttttttttttttttttgtttttttttttttttttttttttttgttttattttttttttttttttttttttttttttttttttttttttttttttttgttttttttattttttttttttttttttttttttttttttgaatagttaaagatagaatgaatggtataggtaggtattgagttttttgtaattggaggtgtttaagtgtagggtggatgggtatttatagggtaggtattgaggaaggatttttttgggattgtggatggtaggataggttttgtggagttttttgagtgggtgtagaagagggagggtatgtttttgttttttgttttttttgggttgttaggttgttatttttaatttttattttttttttttttatttgttgggttttatgggatgggtagaggtattgttagaatatggagttgtggtttatagagggttagtagggaggagagttttttggggattatgttgttttagttattgtggtgattttgaaaataaatgtttttttttttgtttgagtttttgttgtttttgttgatgtggaattagggtaggttggtgatttagtttttatttttgtattgtattggtggtaagttgtttttagttttagattttatagagtagggtgttttttttagaaaaatagtagggaggttaggatattaagggttttagggatagtttgttttttttggttggtatgagttttagttaagttttttggtattttgggggtgaggaggtattagttgtgtgttttagttattggttgttttgaggttgggttggtgttaggttggttatttttttttgttttttagtgtgattttgtagagtttttggaagggttagagggtttttttttattattggtgtttatgggatattgtgtttttattttatttttgtattttagttttagatgggtgttaggaagttggagattttagttattttatgattgtgttttgtggggttggagtaggaataggagtaggaggaatgttttggttatgggattgtgtgaagagagaaggattaggaagaaaatatgagttattatgtttgggttatattttagtagagttgttggtggttttttaggtatttgaatttattaattataaagtttattaggtgtgtaaataaataaatgttgtttaggaggtatagttagggttttgttggagagggattattttggaggggttatattttttatttagttttttagtttttttgttttgtgtgtgtgtagtttttgattattattatttttgtttttgttatttgtttttagggttttattaggttggatgttattgtaataaaatgtagtaatagaaggtttaggtagtgttgtagtttttggtggtattattagagttagtaggtagtagggttggggaattttaagttgatttagttttaagtgttggagtggggagtttggatgaggtgggggtggggaattggggagttatggagtagagtatttgttgtgttgaaggttaggagtttttttgggagattatgaatttagaatattaatattttgtttaaaaagttttttgttttggagataagagtttaggttgttgtggttaggttttgttgtaaatgttttgtataaagtaggttggggggattattgggaagtttggggaatagattggttatgtgtttttttgagtgaaattttatggttgtattgaagtggttaggtagagggtgtgatggggtgtggtagttgtatattggtttagttaggttgaatggggaaatgtaaatttaggtggtttgaaagagatttagtggtttatagtttggtggttgtttttagtataggtgatgtaaagagagaaggggttttgggggtttggtttaggtggaaattatgtattgtttgtgattttgggtatgttgaggttggagtaggtttgtttggtggttggtagaatgtatatgaagaatttatgtgtgttttgaatgttttttttgtttttttgggtttatgttttattaggagttttttgattttgttattttgtaaaggaaattgtgttttgttattgtataggattgaataggtgtgtgtggagtttttaaagttattgttttaaggggttttatgggataatgggagagttgttgtgatgtttaagattaaagtgatggttgggtgtagtggtttatgtttgtaattttagtattttgggaggttgaggaggatggattatttgaggttaggagtttgagattattttggttaatatggtgaaattttatttttattaaaaaaataaaaattagttgggtatggtagtgggtgtttgtaattttagttatttgggaggttgaggtaggagaattgttttgatttgggaggtggaggttgtagtgagttgagattatgttattatattatagtttgggtgatagagtgagattgtttaaaataataataatgttaataataaataaaataataataataaaataataaaagtaaggatttgaataaatatttgtatatttatgtttgtagtagttttatttttaattgtttaaatgtggaaggaatggatatataaagtgtgtgtatatatagtggaatattatttagtttttaaaaggaatggaattttgttattatatgtgaattttgaataatgaattttgaagattttatgttatgtaagtttgttttataaggataaatattgtatgattttatttatgtgaagttaaatttatagagaaattggaatgatggttgttagtagttaggggaaggaaggatggggagttattgtttaatgaggatagagttttagtttgggaagttggaagaagttttggaggtggatggtgttgatgggtgtataatgtgaatgtatttaatgttattaatatggaaatttggttaaaatggtaaatttgttttttttgtttttgttttttttttttttgagatggagttttgttttgttgtttaggttggagtgtattggtgtgattttggtttattgtaatttttgttttttaggtttaggtgatttttgtgttttagttttttagagagttgggattataggtgtttgttattatgtttggttgatttttgtatttttagtagagatagggttttattatgttggttaggttggttttgaatttttgattttaggtgatttatttattttggttttttaaagtgttgggattataggtgtgagttatggtggttggttaaaaatggtaaattttatattatatatattttattatagtaaaaatgtattgttttattagaaaaatgatagatttttataatatgaattaaattataagttatgaaggaaaaattaagtaaaatattaaaaaattatttataagtaattatatttaaaataaaagataataaatatataatttttattattttttaggttttttgtaatatttaattattgtttgttttgttgtggttatgtttttgaggttgtatttgtatgatagaaatattatatttgtggtgattaaatatttttttttagttttatttttaatgatgttatatagataatttgaaattggttggttgggtatgatggtttatgtttgtaattttagtattttgggaggttaaggtaggtagattatttgagtttaaaattagtttggttagtagggtgaatttttatttttagtaaaaatataaaaattagttaggagtggtggtgggtgtttgtaatttgagttatttgggaggttgaggtaggagaattatttgaatttgggaggtggagtttgtagtgagttaggattgttttattgtattttagattgggtgatagagtgagattttgttaaaaaagaaaagaaaagaaagaaattggttaaggtaggaatattgatattataggaataggtaagtgttataaattgggaaattgagtgttgttgtttttgttggttttaggtggttggttgttgattgttaattggtatattattggaggagggaggtttagattgatttgtagagagattagaggtagaaatgtattatggtttggatgttgagggtgagggaaagagaggagttaatagtggtgtttggagatttggtttgagtaattaggtggatggtagtattgttttttaagatgaggggttgtgggaatttgaggggttgtggaaggttttgttattgatggatttagggtttggtagttttgggaggtttattttgtgttaggttatgtagagataagattatttgggttttgtttttgggaagtttttgtttatgaggatatagtttgttatttaatggggtgttttgtttggagttttagtgttgttgggagaaagttttttatttttttttgttttttgagttttttttgtttttttgttagttgagtttttttatggaggttgtgtttggaggggggttatggatatggatgtgtgtgttaaatgttgtttttttgtggattttttttttattttgtttttatgttttgtaagttttatttttttggggtttgatttgtggggtttttttttagatttgtttttttttatttttagaaaggtgtgtaggggttttttatggtttttttttttgtttttatttttttttttttgggatagtgatttgttggatgggtgggttatttatagggtttgtgattgtttagatatttttgttgtatgaagttttgattttaaggtatgatgtagatgggaataaggtatgagttttttttggttgttgtaataattgttgaaattgggtggtttatagtaaggggaatgtgtttttttatagttttggaggttagaagtttgaaattaaggtgttagtagggttagttttttttgaagattttaggggaaaatttttttttgttttttttagtttttggtggttttaggtgttttttggtttgtggttgtattattttggtttttgtttttgtttttataaggtttttttttgtgtttttgtatttttttttttgttttttagaaggatatagtattgaatttagggtttattttattttgagatttttgtttaaattttttttgtagagatttttaaatagaattaggttatatttgaggttttaagtgggtatatttttgttttgggggggattattggtttattgtaggttttgttgtgtattgaagatgtaggtggtttttttggttaggtttgtagttggttttgtttttttttgtgattgtggaagaatgtattttgttggatgtataggtttttatagtttttttgtttttgttaaattttagtttagttttttttttgttgttggtgtgtattttttttgtttagtgttttttttgggattgtgtgtttaggttttgaggttttagaaaaggggggtggagggtttttttattattttgtagtaatgaggttttattaaaattttggagttttagattggatttagtttttagttatgattaaaggatagtttgggatatgattaaagggttagagaaagatgatttaggttgagaaagaggaggttaaggagtaattggattgtttttgaatgtggaaaaggtaattatgatttgaagggtggtgtttagttgttttttattttttttgaggataggaaaaaaaaggaaataaatgatgtataattagagtagttggttagatatgagggtgaattttttggttgggagtatggttaagttttgatttgggttttttgaaagagtttggggaatttttttatttggaggtttttaggtttggttatgtggttttgagtgattatattgaaggggtagtggttggggttggagttggtgggttttgagtatagttatgaaggtatgtgtattttttggttgtttttttgttattgttttttgggtttttattttggtgaggtgtgtattttggtggtgttttttagggaattaaatatgtttgttgtattgtgtgtggagatggagaatgtataattggttgattttgtgttaatttggtggaattttatgttagttttgggaaagaataattgtatgggtgtgtttatatttattaggtgttttttagaaaaatatttgagaataatgttgtggtttaggatggttgttgtgttggatttggtatttttttaggggggttgtgttgttgggttgagttttttaggtattggatttttaaatttttaaatatggtgtggataggtggtttagtaggggttggattatttgataggtttaggtgttggagtttagataagatatattttggtttggtgtggaagatatggggtgttattaatggtagtaatggttgtatttttgaaatttgggtttttaggttgatgagggtgtgtatgtatttgaaatgtttgtggttttgtagtttttatgtttataaatttatttggttgaaaatagtttaaaatatttaaagtatgagggagggagtgtttgttttttttaaaaaggaaggatttgattttatttatttaaaaagttatttaaatttagaatattttttgtaagagattttttgttttttgtttttttagaatggttggagagttttagtatttttgtatatttgggatattttagagggggtggggaggggtaagtgggtagtgagtgattttagatttaggatgagttgttaggtgttttttggttatatatttaagggattggagtgtagttgtagtgttgtggtttgttgttttgggggtgggggtgttgttttatgttgtgaatttttatatggtttttgattttgggtagaggttgagggtttaagggatggggtgatagggagagtatgtaggagtgggtttttggttttttagggtgagtggaagaagtgttttttttttttgtaggtgatagatttggggggttttttttgaggatgagagtttgttgttttttaagttttgtgtttaatttaggtttttaggtttattttagttttttggttttgtttgttttgtggatgatatagtttaagggtagagattgttggtttggagggaaggttaggttttaggttagggtttagaagggagggagaagtttttggggtagttttttttttgtttatttattgtttagtttttttttttatatttttttttggaaatgtttgtttttgataaggtttattttttgtttttaggaggtttttattgtggaggaagggaggtgttgtttgtttttggtttttttgatagttgtgttttatttttgttttgtgtttttttttttggatagtgttttttttagggtttatttaggagggtgtagtggtggtttttggggtggtggttgtggtgggggtgttagttgtaggggtgtttttggtgggtgggagttggtggttttttgttggtgttatgggatttgtatgtttgttttgtgttttttggtttttgagtttataggttgggattttgtttgttagttgtgtgtgttgttgtttaatttttgtaggtgtagagtgtgtggtggtggtgatagagaattttgtttggttgtttaaatatagttttttgtagaaggattttgtgtttggggaaggggaggaatttttttttttttgggtgtttgttttttttgttatggtttggtttttatatttgtttatatttggttgtagtggggtgtttggggggaggggttgaggttgtgttttttgttgttttttgggtgtgggttaggtggggaggaggggggtgttttggttgtgtgtttaggattgttttttagtggttatttgggttttagttttttaggtttggttttgataggtgggtggagtagttagtgtgagatagggaggttggtgtgggtgtgggaatttgatttgtttgggaggtgggggtggggtgggggtgtagtgtgtggggaggggttggtgtttgttttttttttttatttatttagttgagttagggggtttaggggtttttttggtggttagttttgtattgtaggagtgtgggtgtggtgttttagttagtgtgtagggtttgggttttgttgggggtgtttttttgttgttgttttttgtgtgatttgttgtttattagttattatgttggattttgtggttaatgtgtagttggatgggattattttggattttgaaggtgggtgttgggttggttgttgtggttgtggatgtgttggagaggattttgtgggtgggtttggtgtgggatgggggtgtgttgaggggagatgggagtgtgttgaggggagatgggatttttaatttaggtgtttttttgttgagagtgttgtgtgtttttggttttgtgtttgtgttgtttatgtgggggattttgttaggggtatttgtgtagattttgtgtgtttttataggattttgtgtttgttttgtgtattgttgtttgggtttttttttttttattgttgtttgtgtttgttaagtgatagtgatttttttgagggtttgtgaggttgttttggaattttttaggatgtatagttttattttgggaaatttattggttttttttttttggttttttttggtggtttttgggttttgtttggatttggtaatgggatagggaggttgttttttatttttgattgagtggatagttgtgttttgtttgggtggatagttttttttttttttatgttagttttggggttgttaagttgtgtagtttgtgggttgggagtattgaatggatatagtttaggttgtggtagggtttagagtgggatgttttatggtttttatttaggtttggggatatttttatttgttttttagaattgggttgtgggggatagaaggggtttgtgtgtgggtagggagagtattttggtttttttttgtttttggggtttataaagtgtgttgggatttgtggggttgttttgtttaagtttgggtttggtgtttgtgtttttgagtttgtgagtgtgtgtgtttttttgtgtttttttgattgttggtgttggggttttgtgttttgtgtttgtgggagtaaatatagtaggtgaaggggaagtttatataatggtttttagtgttttggggtagggtttttgaggggtgggtttgtttttgttgggatttggagtttttgttttttggagaggtttttaggttgatttgggtagagttttttggtgggttgggagggggaaaggttgtgttgaaatgagtaaattgtttaggtgttaggttaagttgggaggtgattagtttgaggttttttttgttttatggttagaattagggttgatatttgggtgttttgagtttagttgtttatatggtttatttggggttagttttatttgagtgggggaggtggggttttttgggggattagaattttggttggatgttaagtagagtgttagtggttgttttttagggttgggtttgaggagggtgtggggtggtgaagggatgggagggggttgtgatttagtggttattggtgttgtgtagagtgtgagttggaaatattgtagttattttgttagtttagtggtgaaagtttttttttaggttttatttttttgtatttttgttttttagagggaggggaggtttgggtttgtagagttgggagggtttgttgtttttgttttttttttttataatatttttttatttggatatttttgggtatatgtttatattggggtttttttaggtttattgtgttttgttgagttttttgtagtttttgagtgaatgtgatttttttgtttttgtttttttgtaatttttttttgtgattgtttttttaggggttttttttgttttaaatgtttaagtggtatgatttagttggtttgattattttttagtaagtttttatggagagaggttttgtgttgtgtagagttttttttttgtttgtgggattgaggtttttgtttttagtttttaatagaaagtgttgggtttttagtgggatttttggggaagaatttttgtgttttaatgggagttttgtggtgggaggggaggttagggtttggggttgtgtttgttgtatagttgttattatttgtattatgaaagttgttagtgttttttttttgggtttttgggtgtaattttatttttgtttttatgtgtttttatttggagttgtttttgtggttgttttttaagttagttttgtgattttgtaatttagtttaagataatgggtttattgagattattttggtgtagtagttggtaattttttggttttgggggaaggttttttagttttggggagtggggttttaatttgttggttttttgtgtttattagttttttttttgtgtgttttgaatggttttgttgggaattttggttttagagttattaggtggtttgagttgataggtgtgagagagtgtgtgtgtgtatgagtgtgtatgtgtatgggggttgatttggggtatggaaaggtggttttttttggtgtttaaggagtttggagtatagttggagggtgtgggggtgtgtatatgggagttggataattttgggtggatagatagatgtggggaagggatgattgaaggaggtggaggagagagtgtgatttagtttagttaggggtgatgtggataggtagtttttgaattagggtagagaaaagttattattagttagtaggggagaagttagtatggaggaggtggattttgagggagagtaggaattggattgtaagaggaaggagagttttttggttagtagtagttagtagtagtgggggaggttggaatgagttggttggagagggggttggggtataaggaggggtttgtttgtgaagattatatgggttaggttgtggagggttaggtatgtttgttgggagtgtagttggtttatgggaagtatttggagtggttgggaatgggtgtaggagtagtgttgtgggagtataggttttttttttggggtggtttatttggtgttttggtttttgtaaggtaggttgaaagggtggggaggaaattgttagttttttatagtgttgggatggtggttttagggtttttgaggttagtggatgtgggtgtttgttattatgtgggttgttgaggggtggagattttaggggttattttaaagtaggatgagttttgagttatggtatttttgggggtagttttttaattgagtagatgtttaggtttggaattttgtaatagaggttatagggttttgattagggtgttttgggaggtttagaattagtggtagtatatagggtagatggtaagtgatttggtatggggaaagaggtaggtgtttaggttggtatagtatatttgtaaggaataggtagatgggaagttgtttgtgggtttgtgtgtgtgtttggagttaaaattttgttaatgttttatgttttgggtatatttattttttttttggggagtatttttttttttattttttttttttttgtttgttttttttatttagggttttttttattttttttgttttggggattgagggtattatggttttatgttttattattgatgagttgtatagggatttagtttttttgttgtttaggttgggttttttaggtttagggtttttaggaatggagagggtattagtgttttttatggatttaaattttttgtattttgtttttgttttttttttaagataggtttttgagttttaaggttttagggttttgtggaggttgttatgtagtagtaaggagaatgttttgtatttggttgatgagatttttagagttttattttttatttttttattgtataaatgggtttttaggtgattgtagtatttgttattgtttgtaatagggtgataagagggatgattttttttttttttttttttttggttggtggaggtatggggttggtggatggtatgtgtttttgtgaatttaggttaaatttgttattgtaaatatgattataatttgggtttttgtgtaataaaagtttttttaagtattagttgttggtttgttttgtttagtggtgtttgttgtaattagatttgtatattgagaaagaatttaaaagtttttgatgtttgttgaaataatttggtttaggatttatgtgtttagattttagagttgtgtggtatttgagttttttttgagtttttattgttgtttgaggaggatttttagatttgtgttttggaggtagagtaggttgtgggatgggtttttgggtgggaaggattatgtggatatgtttttttgtttgagagttttaatatttttgggatgtgggagttggtgtgttggtaggatttaggtgttttttttttttttagagaaaaaggttttgttgtttggtaataggtgtagatttgtttttaattaatgttagtaggttttttgtgtgatgaattttgttttttagttaagatttaaggtattttgtgaatattgtttttttgtagtttgagtttttgtggtgggaggtaggagttatggggagtgggggtaggttttttatatgggttttatagttattggtagtattgatttgatgttttttgagtttagagtttagggttagatagatttattgttttgattatgagttggtttatttagaggggggtggatatagtatttaggtagtagatgtattgtgattagttttgtagtggggttgtgggttttttgggttggatgtttgggaagaggtaggtggaggtaaatgttaggatatttttgtagtgattgggtgattgtaggttggaaatgttttttgtgggttgtggttgtttaggaaggttttgaatggggttagtggatagagtttgtatttagaggggtagtgttttggaggagtgaggggtatggtagtgtagggatgtttaggttgtttttattttgttattggaaagttgggtggttttggtttttttagtttttttgtttgtttttttgtttgtaaagtggggttagaaatagttttttttgagggttgttgggggattttgagatgtagtttatggtgttgagtatgggttttgttttttatgggtgtggtgggtgttgtggttggtgtggtatttgggtgggaaaagggggtatttgtaaaggataggtaggtttggatgtttaaatatgtagatttggggatgggaggttttaggtaagggtttgtgtgatgttattgtatgaatgaggttggatagtatggttattattaattatggaaagtatggtagatattagtgttagtagtgtttgtttgggggtttttttgagtttgataggtatttaggtttttagtgtagttatgggatttttttttttttgtttggttgatattttggaggttggtgttatgttggttgtaggttttttttattgggaggttgttttggttttttttgttattatttatttttatttttattttggagtgttatagatgggtggattatatgtttatttgtagggttaagtgttgataatgaggtgagtatttgttggatgattggattatgaggatagtgggggtgttggtagtttgtgtttggttttgtaggttggtttttttttgaaaagtggttgtggtagagtgtgtattttagggagtggtgtttgttgttttgaatatttttatttagtaggtttttgtaagggtttagttaagtgtggtgtagagttgggttggtagttggaatagttttattttgtttagtggtgagattaagggttgatgggttaaggttgtgtgttgtttgtttagtttgtggatttatttattgagtatttttatatttttatattgggtttggggtgttaggaggtggaggggggattgggtgtttggaaaaataagtttattgagagtttgagtttttaggggttagtattaggtagttattatggtgtttggtatatagtggttatttggttttgttggttgttttggtggtggagagtgtgtatggtggttgtatgtgatgggtattatttagggtaatatagatatgtagattgtgtatttgtttgtaggagttagggattttttagtttggtaatttgtgatttttgtttatttgttgggagagaggtgttgttttttgatagtttggtgttgggagagtagaattagggttttttttttttttttttattttttattttttatatgtttaggtattaggggaggttatatttagggatgagttttggttattgggtttagggttttattgttgttattttttttttttgttagttagttaaatgtttgtttattattgtgttggggatggggttggtttgtttttttgaagtttttttggtgtatagtttaggttggagttttggatgattttgttatttttttttttgattttttttttttattttgatttattttagaaatttagttaaaaattaagtttttgtgtttttttttgataaagttattgaggaaaaatggttaaatattgtttttttttttaaagtttttttggttttttttaaatttggaggttttgagttgtttatgagattaaagggtttggaattttttggaatatagttttagaagtgggaggatttgttatttttttagttaaatagatttattagttggtttttagatatttttaggtgtttggggtatttttgggtttaggttgtttaatttggtttgtagagttttgaggttttgtttagattgggttagtagatagttttagagattttaagtttgttgttgtttttaaaagttttgttaatgtttagaaatttagagggataagaagatgattttgatgttagttgggattataaatagtgaggtttgtttttttttttatttatgtttgtttttattgtttttgtagttgggtttttaggggattgtttgtggttatgggggaggttgggaatgtggggtttagattttattgggttttttgtatttttttgtttttttttgtttatttttttttttggaaatttttgaatatttttttatagtttttggtattttgttatttttggtatttttgggttaattgggaaagttattatttgtttaatatttagaaaattaaggggtttggttttaaatatattgtagtgtttttttttttatatggtattgaattttttgtgtttttaaagttaggagtttgtgttttggatgtgggtgatggagttttgtagatatttggagtggtttttttgggagagttttttttgtttttttatttatttgtttttttttttttgttttaagttttggttatagttttggaggggttatttgagtgtaggttgtttttaggtgtatagttggaggggggtagttattttatatttttttgtttgttaggggtatttttagggatttaggttttgagggatagtggaagggtggggtggggagtaggttgttgttttgtgttatttgggtgttatgtagattttgaatgggtagtttttgggagttggttttttttttttattttttttatagtgttgtttttttgaggggttggagttttttggagttttttgtagtttgtggtaggtttttttgattttgtgtttggttttgtagtttttaatttatagttagtggtatgaagaatatttttggttgtttttatttgtggtttttgtaggtagtagttttttggggtagggtttgggggttttggtatttttttgtgggattttttgggtatgagggagggagttatttgggttatagatagattttttttttgtatttaggaggtttaggatggatttgttttatttttttttttggtgggaagagagtatttttggttatggggaatgtggtttggatagagttatttagtttttttttttttttaggtagggttttgaaagatggagatggttttgtttttgttaggttaatagttagtagtttggtggatttttatgtagtttaggtaggatttttttttgtttttattttttattttatgtgtaggaagttggttttaagtagggatttttggttttgttttttatgtgggtgggtagtttttttgtgaggggtaggttaggtttttgttttatgttttttagagattgatgttatttatagtaagagtatataagtttttttggttttaaattaggtttggaggggtggtttttttttttgttttttgttttttgttttttattaaaggttagggaatggagtgttttgtatgtttgttggggttgggtttttttttttggtttaaaatgaagggttggaatttttggtgtagattgtatggtgagaggtgttttttgggatttatttgaggagtattattgttgaatgttttgttaggttaggagtattgttgggggtgggagaggtagttggtttatttgtttatttaatagttatttatgggtattttaagggttagttttgttttaggtattgggggtttaggtatgggtttaggagaaggggtagaatgggagggttttttggaggaaggttttttaattagagattggggtaggagtttgttaggtaggtgatgttggttagttttttttgttattttttttttttttttttttttttttttttttttttttttttgagatagagttttgtttttgttgtttaggttgtagtgtagtggtgtgattttggtttattgtattttttgttttttgggtttaagtgatttttttgttttagttttttgagtagttgagattttaggtatgtattattatgtttagttaattttttgtatttttagtagagataaggttttattttgttggttaggttggttttaaattttttattttaggtgatttgtttattttggttttttaaagtgttgggattataggtgtgagttattgtgtttggtttttttttgttatttttgtagatttatagtgtgtgtggaagattgtatgtttgtgtttggtatagttgtttttggtatttaggtgggaggtgggggagagggttgttggtgttagtataggttatggtatgagataggtttttgtagttaagtggggtgtattgtagtattggaggggttttgttgtgtatgagatttaggttttgtatttgtttttttttttaggaggtttggagggttgggagggattagggtggtgaaataatttaggtgggagagaggtattgttggagaggtagagggagttgtaggtttgtagtagtgagttttaaattttgggtttttattagaaaattttagaaagggttgttttgtttttttttttaaattataaaagaaatttttggttgtttgggttttttggggttgggtgggggaggagattttttatttgtatttttgtaggtttagtattgtgtagagggaggagggtggaggtaaaggtgagggaggagggtggaagtaaaggtggggtttttttttagttttgttgttttgtttggttgttgtttttagatttttatttttggtttggaaatatggaattttgggatagttggggtagggggtatagaatggagattttggtgagggaggaattttttttttagttttggttgtggttatagtaaggttaggttgggaggattttatttaaatatttatattttttttaatatttaaatgatgaagtaggtttttgtatatagttgttttggagttagttgttgtttgttttatttttttttttttttttttttttttttttttttttttttttttttttttttttttttttttttttttttttttttgtattttttgtttttgatttaagtttaggtttttttagttgttttttttttatttataggtattttttgtgattgagtttttttttgttattttttataattattttttttaattgagtattttttaggtgttaggttttgggttggtattttgtatataaggtgttttttaatttttatgagagtttaataaggtagattgggttgttgaggttttagtgttggaaggttggtttgggtttttttagtttgtatttgtatttatttattatttttttattgtggagatttgttttttggtttttggttgagtatgatggaaatttttgtttattagtttttggagagtggggatggttgagggttttgattttggggtttgatgggggttgtttttgttttattttagtttggttgtttttttatttaatgattgagtttgtaaaattagaataatagtgttatttggttggtattttgggtggttgggaggtgtgggagagggtgtatggaggggttgagtgaggtgttagtattgtggggatttttgagggtagtttttttaggtttagggtggagtgtaggtagagggtgtgatggtttagtgtgttggtttatatttggttttgtttttgtttatatggtaatgtgggggagttattagttttttagtgttttagttttttatttgtgtaatggggataagagtaaattattgtttttaggtatggtaagtatttatatatattgattattgtagaatgaatatagtgagttttttttaggtttttattatatgttaggtagggtgttaggttttagtggagaggggataatgatgggtaagttggtttttgtttttaagggttgttgagtagggaggaaggtggtggttgttttgattgtgatttggagtggggtgatttgtaaagaggttggtgggaggttggttgggggttggttgggggttgtttttttttttgtttgtgttttgtggtagggtattaaattggttttttttatggatttttgaggttttgattgtgggattttgggtaggttttgggattttgtgattttgtttttgtttgttatttaggtttttgtttttagtagtgtttagtatatggtgatttttgtatgttttttagtgtgtgattgattttggagttgagatttggtagttgaggttggatattgtttttggataatttttggggaggtgggggtagggtggggttgtgagttggtaattttgagtttttagtagtttttgaatggaggttttttttttgtaggatttttggggaggaaggaggggatgggggagatgaggtttgtgagtttttaggagggtagaggtttatatttgtagtgttttagaaatattttggggtgtttaggtttatttagtttttttgagttagaattattaagagttggggattagtagtttattttttagtaagatttagaaatgatttttttgaatagtttgagttaagaatgatatatttggaattagaatattagaattatagaggaattgagagaatgggtttaaaatgtgtagggattttagttatatggtgttatatggaggaaagtatttaatattattattgtatgaatttgtttaaatatatatatatatatatatatatatatatatatatatatatatattttttagtaaagagtggaaagatatttgttagaatattgatggaagttatttgggttgtgggtttatagattttttttttttgtttttgtgtattttgtaaatttttggttttgtgtttaaattttttttatagttaggaataaagtaatagatgttattttttaaagtttatgggtttgtgtttgtaattttaatattttgggaggttgaggtaggaggattttttaagtttaggagtttgagattagtttgggtaatatagggagatttttatttttttttttttttttttttgatagagttttattgtgttttaggttgaagtggtggtggtatgtttttggtttattgtaatttttgttttttaggtttaggtgatttttatgttttagttttttgagtagttggattatagatatttatatttgtaggatttgagaattttataagaggaaagtttttatttggaggttgttggggatttggagttgttagtttatatattttttagtagagatagggttttattatgttgattaggttggttttaaatttttgtttttaagtgatttatttattttggttttttaaggttttaggattataggtgtgagttattgtgtttggttatgggagatttttttttaaaataagaataaaaataaaaataaataaaagtttattgttaaaaagaaaaatatattatttaatttaatttttttttaggattgagagatgaggaagtagaggttggaaagtgttatattttttggttgttggtagttaggggatttgaggtttgggttggtttttttgtgttttaggtttggggtgttaggtggagtttttgttttgtttaaaggtttaggtgtttttgttagtattgtttgtttttgtatttttggttataaggaatgtgggttaaaggtagggtttttgatttttgtttaggagggtgaagtgggttggttttttttgtttttgttttaaggtttttgtggttgtgtttttggaaattgttggtttgagttagtgtgtggagttgggatagattttattgtggtttttgtggggttattttatgtttgggttggaagggattttttggtttagttttttttgttttttattaggaaattgagattagagaggttatttgtttggtttggggtggggtgtagatggtgtttgtgatttttgtatgttatgtgtagatagttttttagttgtgggttttttatgtaagtagttatgttggggataatttggttgaaatttgtgatttaatgaagagaagaatgattttttttgtagttttgtgttttataggtttttttttgtttttattttttttgtagaggggttttatgttggtgggtgggtttttgttgttgtaatgggtttaggtagtttttgggtagtggaggtttggttgtttttttgtttaatgttttttgtagtttatgttgtttgggaagggtggggaagtatttagttattggggattttataagatgggtatttgggagatgttgattggtaggttaggtttttgtggtttataggtaggttagaggttatagtgttgagttgggttgagttggtagtttagggtagtgggggtgggggtattttgtttagttatgggtttttttggtataagggtttggagtttattgtaaataatttttttagttttttttttttttataggttattagtagaattgaggggttttttgttgatgaggtgtggtttgggaggggttagttgtttgtttatttgatttttgtggataggtgattataggttttttgttttagggggttgggggaaagattggggaggtttttttggtttttttatttggaaggaaaatatgggtataggggagatattttatagggatatattttagttagtattttttggttgtgttgggggtatagtgtttgttttgtttataagaggggttagttttttttaggatttaattttagtttttagtgtagggtagatgagtatttagaggtttagaggatttatattatgagagagaagttgtgattatataggtattgaaggttaagtagaagagtgggatatatgggtgatttgaaagttttagggttagtgtggttagttttagatagttggggagttttgggtattaggtttagtaggggaggagggtttttgtgatagtttgttggggttgttgtaataaagttttatgaattttgggggttgaagatggttttagaggttagaagtttaaaattaaggtgttgattaggttgattttttggggtttttgtgggaggttttggtttaggttttttttttagtttttggtggtttttgggtgtttttgggtatgtagatgtgttatgttattttttgttttgtttttatatggttttttttttgtgtttttgtgttttgtaaggatgtttgttattgtatttagagtttattttaaatttaggatattttttttttgagattttttattgtatttgtaaagattttattttaatttttgttatatttataggtttgagggttagggttttggtatgttttttgggggttattatttagtttattgtggtagttgattttaggggaagtagaatgttttaagtttggggtgagtggagggaatgttgttgggtggggagtgggagattaggtttggagatattgtggattttttttgtttgatgagggtgtgatgaggtttttattttaggttttttgaatggtggttgtttttgaggagatttttttttttggatttgtttttttagaaatttttatttaggtttaggttttaaggtggatggtaagaggtggttgtttttgttatatttgatgggtgagtgtgtgaatggggttgggagtaggatatttgttatttttgtggatagattttagaggtttatgaatttgttgttggggaaggtgtttgatttagtttgattttttatttttatttttttttttttgtttttttttattagttttgtttttagagttttatttttttaaaggtaggtgttgttttttggattttttagtagttattttttattttagattttttttttgtaggtttttttggttttagtgtttatttttttttgggtttttgtttttttattgtgaggtttttgggtagaagtgtggggtttttttgttgtgtttggtttttgtggtatattaggggtttttttaggggtttgttttgtttgttaggtttttagggagttttttaagtttttagatgggtttgatggagttttttaatgtgttgttttagagtaggaggggttttggttgagtttgagagtttttttagttatattttgggttgtttggggtagttaggtagtttgttttttggaggtgttgtttttttttggttattttttttggaattttttgtgtttagttgtggttttttttatatagtatatttattatttttttttatttgtgatttttttttgttaatttttttatgtttttgagaatggagattaggttttttttattttggagtttagtagaatttaaattaggtagatttgtgtaggtttatgtgggggttttgtggttattgtggttttgttgttatttttagtttagtttggtgtgttttggattatgttatttagtgttggttttttaaattttttttttggttttgtaggtttgggaagtagttggtttttgggtgtagttgtgattggagtttgaattttgttttttggggttattgttttttgtaattaggttgtagtttatattggtttgggtagaggttattggttgtttgttttggggttataatatagagagttttgtgattaatggaggttttatttgggttaagtggtttttggtgttaggtgtttttttttttttttttttttttttgtattttttaagtgtttgtaatattttttttaatggataatgagatgaggagggagggaggggtggtttttttgtttaggtagattaggaatggttattgtttgtgtgtgtagtgataggtttgggaatagataagggagagtttgtttgggaggttggatttttatattgatgttgtttgtgtttggtagttttgttttgggttttagaatagatattgattaatatgttttttagggtttttaggtttgggttttggtttttggtagagttttttatttatgggaagaagtattgagtagttttgttggttttttgtagggagttgggatgtatttttaagagtagtatgtgtgaagtttggggtttgggtaaaggagtgtttggggaagagtttgttgttgttggagggttggaagtagaggggaaggaggggtatgtggtaggttgaggaggtggttggtgattttgtggtggggatgagggggttatgagtagattaggagttagtattatgtttttttgtttttagaattgaggatggagagttgttagagaggttttggtggggtgtttggggttatttaaagggtgtgggtggattaaagttgaggaaagttttattttgggggattttgtatttaatttttgaggtttttagagttgtagtttgtggttttttgaagttaattattttttagggttttgtttttgtttttagtgatagttatttattagggagtttttgatttaaggagatttgaaaggttatttggttttttttttatttttaggtaggttatatttagatttttttatatagatttgttttatttttttgttgttttttattagggatggagggtgggtggtttttttatttaggttttggtggttttattttagttaggaaattttttttttttatttgttttatatttttttttttgtggtttttgtttatttttttttaatttgtttttagtggagtagttagtagttggtttagaatttgggggtggggggagtgttagattagtgtagtatatttgagagtgtgttagaggtgtttttatttttatagttgatttagtaaagaaaagaggaagtttagtaatttagtgttattttaaagtttgtttggaatgattttgtggttgttggaattaggggtatgtggtagatgatgggagtaggtatagagaggtttttgttttggattagttgttgttgtttttttggaggttgggttgttttttaagaagaggatttaaggttttgtgagtggtggttttttttggagtttttattgtggttttggttttgttttgtgtaaagagagatggtttgaagtagaagttgttatgtggttgttttaggtaggtgtttgtagttttagttatttgggaggtggaggtaggagaatggtatgaatttgggaggtggagtttgtagtgagtagagatggtattattgtattgtagtttgggtgatagagtaagattttgttttaaaaaaaaaaaaaaaaaaaaggagtagagaaattttttttagaaggtttgtagttattttttttttatgttttagaggtaaaaaaaaaaaaaattgtatattttgttttttttttttttttttgagatggagttttgttttgttgtttaggttggagtgtagtggtgtgattttggtttgttgtaagttttgttttttgggtttatgttatttttttgttttagttttttgagtagttgggattataggtgtttgttattatgtttggttaattttttgtgtttttagtagagatggggttttattgtgttagttaggatggttttgattttttgattttgtgatttgtttgtttttgttttttaaagtgttgggattataggtgtgagttgttgtgtttggttatatgtttttgtttttgaataggtggttttttgattttgggtgtggttattttaagattttgttttggtggggtataattttggttttaggtagggtgattgtataatttattgttttttgggggatatgttagtgaaagggatttttgaatgattatggtgggataatagatgtgagttgggtttgttttaggaaggttggatgtatgggttttttgagttagaggagataatagtagaaagttttgtggttgatgggattgagtaggagaagggttggtggaggttggggtaataatgtatttgtttattgtgaagggtttgtgtgagttgatggttgatgagagggtagtggggtgaggttgttttttgttaggttagattagttttaggatatttatattttttttttagaattggtgatttagtggttagaaggggttttagaattgatgggatattgagggagttgaatggaatggttggagtggttatagtaggttttaggtttttttttgttttttttttgtgttttgtttttggggtttatattttggggttgttgtaatagagtgttataatttgggggtttataaatatagtttttggtggtttttggagatttttggtgttttttggtttgtagatgtattattattatttttgatttttggtttttgtttttatgtggttttttttttttgtttgtgtgtttttttttttttttgttttttataaagatgtttattattggatttagggtttattaaatttagaatgattttattttgagatttttattttaattatatttgtaaagatttgttttttaaatgtgattatgtttgtaggttttaggagttaggatttaagatatattgttttgggggatattgttgaatttattatatttaataaatttagagttggtgttaatgttttttgtggatattatagtagattttggaggttttttgtaaaggaatttgtaggatttttttttttttttggagggatgagattgtagttgggttggggaaagttgttggtttaagttggggttggtttagttggtgttggtttgttaggttgttagagagttttatttagggagaaattaatattataaagttgggggataagagaaggtttggaattttaagggttggttgttgaggttagttgtttatttttttgtgttttattttatagggatttaggtttgttagtgttttgtttttggaaggaatgttgtgggttgttgtgttttataggtagggtggagggtttttttgtagttagtgagttgttttttttgtagtgtgtagagggaaggaggaggtttgtttattttttttggttttagttgaaaatttaattataggttttggtattaggtagatttgtttatttttatattattattgtagagtgagttaggttttttgggtggggttgtgatgagtaggaaggatttttggagtgtttgggattttttgggtttagggttgttagaggtagagagaaagaagtttttttttaatatttgagtaaagatagttattagaatttattagagtggttttttgtggtttttttttgggtgttgatttttttggtgtatttgaagtttttagggatattattgatgttttttgtatttttatttaggggttagtggaaatggttttttttttttttgtttagaggtattgtggatgatgattttaggttttagattttagttattgggttatgtgtgtagataagtttgggtagttagtaatttttggttattaagttggttttttgtggattgggttggtattggaggtgggttttagttgttagtattgtggtttagttaggtttggttttgggaaggtagagggggaggggattgggaaagggattgagttgggggtggggtggtattttggttttttttttttagatttttggtaggtttgaattatttggttgtggttttttaaggagggagtgttttttttgttttgatgtggattttgttttttgtttatgttgtttttgtttttaaataaatgtggttttttgtggggagtttgggggttgttttttattgatattgttgttttttggtttttttttgtaggttttgtttagttttattgtgtttatttttaagtttttttttttggatggttttgttttttgagaatatatttttttttattattttaattgtgtttttttttttatttggagtttgttttatttgttttaggagttattttttttttttattaagtagtttaggttaattttggagggttaatttgtgtttttttagaagtaggttttgagatagggattttagtgggaggggatattaggggatgtttgagtgtgggaatgggttaggtagggaatttagttaataaagggtgttttattagtttattgtgattataggtggttgtttagtttttatattgggtagtatggggagattgtagattgtgtttttagttttgttttatttggggttgggtaagggagttggggtttttatattttagtttttggttaaggattgtattgtttattttttttagttttttgagggtttgggtattaggaaaggttttgggtggagatatggaaataggttatgtgaagttagtgggtgtgattggtagtagtaaggttaggatagttttggttattagtaaggtgattatatattttagtatgtatagtttttatagatatatatttaggagatggtaattatattagtaatagttatttttgttgtgtgttatgtttgtatttagggaattttattttttatttatttatttatttttatttgagatggagttgtgtttttgttgtttaggatagagtgtaatggtataattttggtttattataatttttgttttttgggtttaagttattttgttttagttttttgagtagttgggattataggtatgtattattatgtttgattatttttgtatttttagtagagatggggtttttttattttggttaggttggttttgaatttttgattttaggtgatttatttattttagttttttaaagtgttaggattataggtatgagttattgtgtttggttttaggggtattttattattttattattttttatagtaggtgatattgaggatattgaggtttagagtagattgtggttatgttatttttttgtttggtttttttgtttttagttttgaaataaagagtatggtttttgtgtaggtttatatgttttgtttttagttttggagtagtttttaagttttttgaaggtatattaggtttttgggttttgttttttaagttttggataaataggaggtgaaggagtttttgtaattggattttattttgttagtgttaaggttttgtttgattatttattttattttatatagattagggatttgtgttaaggtttagtgttataggagagtgaagataaggaggtgtttatggtgtatatgttgttggatttattttgtagattttaagggttatggggagttatttgttaggtgaggtttttttgtggtttttttttgtaggtttagggtagtatatagggaggtgtttttttattttttggtattatttgtttggtttttttgagttttgattttggtttttagatagttagtgtttttttagggatagaatttgttttgttgttgtttagaggagatttagtttgattagggttagtgtttttggaatttgagtttggaattttattttgttttgggtagaggttatgttgtttttttttatgagagttgagttgtgtatgagattattttgattttgggttttattatttttttgtatgatatttgttttaggttggagtagggttttgtggtttgtttggtgttttttttttagattgaggtttgatatgtatattaggaagtgtttgatttggttttaggagttgggagtggtttgttaggtagtttgtggttagagtaggggttttaataatggttttttgtgtggtatatttttttttaaataggtttaggtttaggttgtttttgttttgattttgttatgggtttggaggggaaagtttgtatttggagggtggtttattgtggtttttttttgtgtagtagttgagattgtaggtgtttgagaataggagaagttttgtgtttattttgggttgtgagatgtttttttagaggtggggatggggatgggttagtatgtagttatttatattttttagtttgttggtattaaggtttgtgtatgtgtgtgtttttttttttttaattttgtttttttaatatggagttttgttatttgtttaggttggttttggatttttggtttaagtgattttttagttttaggtttttaaagtgttgggattataggtgtgagttattatgtttagttagtattaaggtgtgttttttaagagtaatattggttgggtgtagtggtttatgtttgtaattgtagtattttgggaggttgaggtaggtggattatgaggttagtagattgagattattttggttaatatggtgaaattgtgtttttattaaaaatataaaaaaattagttagatgtggtggttgggtatttgtagttttagttatttgggaggttgaggtaggagaatggtgtgaatttgggaggtggagtttgtggtgagttgagattgtgttattgtattttagtttgggtgatagagtgagattgttttaaaaaaaaaaaaaaaaaagaataatattgatggttttattttttgaatatgttaagtgatttttatgtagtataagtattttagaaggtaggaaaatgtaatgaataatatttattgttatttattttatttagagattgttattttttgtttgggtgtgagtgtgtgtgtgtgtgtaaattgtatatgtgtgtatgaaatggaattaggatttttgtatatattttgtgttttgttatttttatttaatatttttggtattttttatttttaaaaatgtgattttaatgatggtgtaggtttttgatatatgggtttagaaaatttgtggaaatttggattgtttttaggttttgttagtttaatgttgatgtaaatgtttttgtatgtaaatttttttgtatttttgattatttttttgggataaatttttagaagtgggttaaagtatatgaatggtttttaggtttttggagtaagttgagattggtggggattggagaagggatttagggaggtttttgggagtttgtgagattggagtttggttttaggggatttgaatttatagatgaaggagatggttggtaaaggtgggaattttttgttttatgggtgggggggtgatattgttttattttttagtgatagtatggggatttttttaatatgatttggttttgtatttttttgatattgtgtatggtttatagttgtgatgtttagttgggagttttttttgtgttttttagttgtattaattttttgtagatagaggaggaagttgtttggtgtttttttttgttgtgtgggttttttgaatttgtttagttgggtttgtggatttgtgtagttatgtatggggttttaaaatttgtaaaatgataagtttatgaatatttttgtttttgtgggtgaatgtggatattttttggttgtgtttttttttatagggaagatggagatgtgtaaagtgataaggatttgttatttttgggtaggttatgttggttttattgtgaggatggtggtagggggttttttaggaggtttgtatattgggaagagaggggtgattgtgtgtgattgtaggatttagggtgtagttttaggattttgatgggggaggagatgttggggagttttgttttgttagtttggtgatagatattttttaatgttttttggttgggtataatttataatgttttttgtggggaggtaattgtttatgaggtatttttggtagggatgattttgttttattgttatatattttagtaatgaaataagaatttagagtgatgtgatttttttgatgatttttttaattatttggggtttttgtgtgattttaagaagggggaaggaggtagtttttgtttttttgggtttttgatgtggtagttttggaatggttatgtgtttgttggtttatagtgggttatttgttgaatgtggttgtggtgggattggggttgggttggagagtgggtgattatattagttagttttattttgggttattgtgtagttaggggttttatttttttaggggttttgttgtgagtgttttggggttgttggaataaattattggaaattaagtggtttaataaagattgatttgtttatggttttggaggttataagtttgatattaaggtattggtaggattatattttttttgatagtttgaggggaggatttttttttgttttttttagtttgtgttggtttaggtgttttttggttttggtagtatttgtagtttttgtttttattatgtagttttttttattgtgtttttttgtgttttaagtttttttttgttttttttttataaggatattgagtattggatttagagtttattttaaatttaggatagttttattttgggatttttaattatatttgtaaagattttttttttaaataaggttatatttgtgggtttttggggttaggtattagatatgtttttttgggggttattagttaattttttatagaattttagatgaaagtgaatttttataggttgaaatgggggtgaaggtttagtgtgttttttttttttgggagtttttttagggtttgtgtttattttgtgattttgtgatttagttttttttttgagatgaagttttgttttgttgtttaggttggagtattgtggtatgatttgggtttattgtaatttttgttttttgaatttaagtgatttttttgttttagttttttaagtagttgggattataggtgtttatttttatgtttagttaattttttgtgtttttagtagagatagggttttattatgttggttaggttggttttgaatttttgattttaggtgatttgtttgttttgggtttgttttggttttttaaagtgttgggattataggtatgagttattatgtttggtatttagtaggttttggttgttttttttttttgagatagagttttattttgttatttaggttggagtgtagtggtgtgattatggtttattgtagttttgattttttggttttaagtgatttttttattttagttttttgagtagttgggattataggtatatgttattatttttggttaatttttgtattgtttagtggagttggggttttgttatgttgtttaggtttgttttgaatttttgggtttaagtgatttgtttattttggttttttaaagtgttggggttataggtgtgagttattatgtttggtttagtaggttttttagaagtgtttgaggtttggtgaaggtatggtgttatggagtagagaatatttaattttgtttttggggagttggaatatattttttgtagttaattttaatagttatgatgtggttaggatgatatggggagggggtggtgtggattgtgtgggaggttagttttttgggaagggggttggagtgggtttggttttgaggaggatttttaagaggaggaggaggtggtggtatgtttgtttggggggatggtgtgagttagggtgggtatttttttatttaggtgttatttttttgatattttagttgggatatggtttttttggggaagatggatatttttagagtggggtattttttggggaagatggatatttttggaatggggtgttttttgtttttattgtttttttagtatatagttgtatttttttgtagttttggaggttgtgagattttttggttgttatttagaataaatttgtttttgagtagtgttgttttgatggtggggtggtttttgtgggtggaatagtttttgttgttttagagtttattgagagttagtgggtatgggagtggtgttggattgaaatatttagagggattatagagttaggtagtaagtatagaggttagttagtggggagggagggatttatttatgaaaagatattaagtattgaaagagaggagaggatggttggggattggtatatatgtgtattttgtgtagatggttaaggtggtgaggtgttagttatgtagataattggaggaaggaggagtgttttaggggaggggttagttttggttttagaatgatttgtttgtgtatgtgggtttggttggaataaattattgtatttgtattgtagatttaattgtaagtttatattagggtagtttttgttttggtgtagtgtttttgattatgagttggttatggtgggggtgattttaaggggatttttaaggagggggtttattggattttttagggaaggttatttgtttttttgggttggatttgggataaggtttttttttgtttagtttttgttttttaatttgattgtatggaaggatgttgaggatatttggaagttggtttttgttttatagtatttataggatagaggtatattatgtggggatagtttggatagtgtttaggaggtagggagtagattagaggattgtgggaggttttgggaattgtatgaggatttaggtattgagttttgtattttttggtattagtttgatgtatagtttggttttgtgtttattttgtattttattttttttatttgtatgggggtggtaataatattttttatagtttaggtttaagtgggtgtagatgtgatgagtttggtaagtttattttattatatttagttttgggtattgaattttggattttttggttggtagaagtggatatttaatttttttttggggttttggggtttttgtagaattagaatatagttagtagtttgtatgtagggtgtagagggatagagggatattatgttgggagtttatatttggtatatttttgattttggggtttagtgttttgttgttttgtggttatgtgattagttagaggttatggttggatttataggtgaatatagtttgtggatttgattttgtttggttttgtggtgttttattttatttttagttttagtttgtggagatagagttttgttttgttagttaggttgagtgtagtgatatgattttagttttgtaatttttgttttttgggtttaagtgatttttttgttttagttttttgagtagttgggattataggtgagtgttattatgtttagttaattttttatttttagtaaagatggggttttattatattagttaggttgtttagtgttttaaaaagggtttgttttgttttgtgttagtatttaaagattaggagatattatataaagatttagatttttatttttttgagaagtgaatagttttggttatgttgggtttatattttttagggtagtgatggagttgagatagggtttgtgataattgagagttttttggagtttatatggttttttgtttagtttttggtggaggttgagtttagtgatttaggattttgtttgtgtttattaagaaggagaggtgtttgtggtttagagagggtgtttataggagtgttttgtttaggaagttggtagttgaggtggttagggttagggggttgggttttttttttttttttttagtgtttgagtgtatttggaggaagagagatgggtgaggggaaggtattgaaattggttttggagtgttattattgggggttggggattagttgttatttttttttttgtgggtaggggaggtagtggtgggattttatgagatttggattttgtggtttggtgaggtagggagtggttggggagatattgtgggtttttataggggtgtgttgtgggtttggtttggggaaggagttggtgaatgtgtttgttatgtgggtttttttttgttttggttttgataattaggagtggttggtttttatttggagtgtggttgtggggattgtggaggtggtagttttttaggtattatttttattgtttttgagggagtagattttggtggagaggtaggatggttgtagggtgggagttggtggttggtattattgtatgggtttgtagtagtggatgggaagatgtaggagaggttgatgattgagaaagttggtttttgtggattaagttgggggagttggataattaagtggttagaattttgggttttggtattagtttgatgtatagtttggttttgtgtttattttgtgttttattttttttatttgtattgggggtattggtattttttatattttagggttaagtggttgtagatgtgatgagtttggtaggtttggtgttttgttggtattgaaagttttagtgtttgtttttagtgttattgatggggttttgtttttgttgtggttttgattggttatagttgtggttatttattattggaggtatgttttttgttgtggttgatggtagaggtgtgtttgttggtggtgttttagtgtgtgttttggttggaggtgaggagggataaaaatagttgtgataagaaggaaattaaggttgggtatggtggtgtatgtttgtaattttagtattttgggaggttgaggtgggtggattgtttgaggttaggagtttgagattagattgattaatatggtgaaattttatttttattaaaaatataaaaattagttaggtatggtggtttgtgtttataattttagttattggggaggttgaggtaggagaattgtttgaatttgggaggtgttgttgtattttagttagggtaatagagtaagattttattttaaaaaaaaaaagaaggaaataaaagttttttttggaattagaatgtttttatgtagatgtagttggagggggaggttgtgtggtttgtgttgtggttatggtaagatatgatgggtagtatttttttattttagtttgtatttttgttttagaatttatgatggtttttttaggatggggttgttttttttgtttgttgagatatgaaggatgggaagagatttttggtttttattgttgtattgtttgtttttttttgttgttttttagtaggaaatatgttggagtgttttttagttatttatttattaattgtattttttttttttattttttagttttgaaaagattttttgaggttgaggaggttgagatatttaattttattttattttggagggtttagatttttttattttgagttattgtggttagttttatttagaaattttaggatttgggtgtgaagaatttagaatttttggtttgttatgtggattttttaagttaatgtttttttaaggtgtttttgtggagggtggagtttttgggttttaaggtggttgagttggtgttttggtgtattgagttgtttattgatattttgtttaagtaggtggagaatgttggggttattggtttgttttggtttgggtttaagagggttgaggtgttgggttataagatgttagaattggttttttggaggatggagattattattgttaaattttaggagttagtttattggaggatggagttttttgtttttaaggtttttgaggtgtttattgtttttgttattgatgtagtttttaagagggtggagatttagatgtttaagtttgttgaggtgtttattgtttttagtttagtttagattttggagaatttagagtttgtttttgtgttttagttgtagagtaggttggagtttaagttttagttttttgtggttgaggttatattttggagttaggagggtgagttgtagagtgttaggttttggatgttgtggtaatggggggtttggttgttggttttgttatagaattttggaggaagaagttggatatggggtggagggtgttattttggagatttagaaagattggaatgtatgggggtgggggtttgtaagtttaggagaggtggttttttttgtttgatgggaatatgttaagatgttttaagtgggatttgaatgagagtttggaaagattttttgggttttaaggagttttttttatgggttattgtgggttttgttgggatttttgtttgttgtgtgtttttggagggtttgggaggtttagagaatgaggagttatgtaggaattagggtaggtttatgtaggggtgtaggatagggtggagttgagatttttagaagggttgttatattttggtggtttttgtttgaggaattgtaggttgtttggatatgtttagtagaggttgagggtttggggaagggaggagggatgtatgttttttgaggtttgtattggagtttatggtttggttttttttttttaggagggatggttgtggtagagggaggggaatatgaggagtattttagtttgtaggataaaatttttagggtattgggaaggggtgtttggattagggggttgtgtgatagttgtatatggttttatttgggggtgtttttttggtgagaggagagaggttatggggttttagtagtgttttgggagggtttaagtttatagttgtgttgatatggagtttataggtaggggattggtgttagttttgtgggatatagggtttgtttggaaatgttaggttgtgggatatggttgggtttttttttagaagtgtgttttttggttttagtagggattgtggttttatggggttatagtaaggtgttagttgggttagaagttttttaagagttaggtttgattttgggtataggattagaatttagtaatgtttagtaagttttttttaggttggataaatagtatagtttgggtttttgatttagttgttgttttttatttttaattgtggtgaaatatataatatataatgtgtaattttagttattttgtagtgtatgttttagtggtatttagtatatttatggtgttgtgtagttgttattgttgtttatttttggtattttttttatttttttaaattgagttttgtttttgttagattaagttttttatgttttttttttagttgttggtagttattattttattttttgtttttattatgaatttatttgattattttaggaattttgtgtgtgtggaaaaatataataattgtttattttgtgtttggtttattttatttagtatgatgttttaaaggtttatttgttgtgttgtagtatggggtagaatttttttttttttagaggttgaataatattttgttgtgtgatgtatttgtgttgtgtagttgtttttttattggtggatttttgggttgtttttatatttttttaagtttttttttttattttttttgatttttttttgatttttttgagatagggttttgttttgttttttaggttggtgtgtagtggtgtgattattgtttattgtaatttttgttttttgggtttaagtgattttttagttttagttttttaagtatttaggattataggttgtgtgttattatgtttggttaatttttaaattttttttgtagagataggtttttattaggttgtttaggttggttttaaatttttgggtttaaatgagttttttgttttggttttttaaagtgttgggattataggtatgagttatttaatttttttttggtttttttttttgaatgagagttttttagtggttagtgggtttgggggttgggaggatgtggggtttggagagggtgtgggtttggggggagattagtgttttttatgtttttatgggtatgtggagtgtatatttgttttggtgggtttggggtttgggattttgtattttttatagagggggtattggaatatattgagtagttagaggttagtgggttttggaaggttttttttggtttttagtgtgtgagttttgtgtttttttttttatttttttaagtttgattttgaagagttattttgttttagttatttagatttagtgatagtggttgttggtggtatggtgttaggttaaaggtatgggtagtttgtagagtggtaggaggttgtttttttttttgttttttgttggtgtaggatttttgtttgatgtgttggatatatttttattttgggttgatgtgtttatatttagttgagttaaataggatgtggttggggaggtggttgttattgagttatttaaattttggtgatggttggtgttggatgtatagggatgtggttttggttttgggggataggtagggggatgtttatggggatgtataagaatatttttttttaggggtagatatagtttagtttttaaattgtgttagagattgtgttgggagttaggtttagggatataatttgtgggttttgttttttggagtttattgagttgtgagtaggatggttgggatataaggagtgtttagggagtttttttagtagtggaagtataattttattaggttaggaaggggagagaaaggtaggttatgtggaggtagtagtgtttagagttgttaggaatttggtgttttggggggatggtggttttttttatggaataggatgtatatgttggagttggggtatgggagaaaattattagtattttagatttggttatttatggatagggatttgtgtaggtgggagtttagtttatgtggagaggtttgtgggttgggttgatagttttgagggtttaagtaagtttaggtggaggaaatgtagggatagatgagggtagggtttttttaatggaggagtgtttttgaaatttgatgggagtggttttttggggggtttaggtttgagttttattagttttttttttgaggtattatttgtttgtttttttgttttttttttttgtgttatgattgttttggatatggatttagttttttttaatttagttttttgtttattttttttttaggtttatttttttttgtttttttatgtggggttgggttgggagttttttgagttttgatatgtatagttttgattaatttttgtggtttttttgttttttgagtattagggatttagttggtattatggggaaaggaattatggagggagttttgtgttttttgagtagatgtttagttttttggtttttgtttgtgggagggtatttgtgttgtggtttgtttttattttagagttgtgggtgtagggtagggttttttggggttttagttgaattgtttttagattgatttttttaaagtatagtattgttgagatttttttttgtgttgagttttttttgtttatttattataggtttttttatggttgatttatttttttgtttagtttatattttttttttttttagttttttttgttttggtttttttttggttttttatatttttttttataatttttttgttttgattttttgaattttgatttttgtttttttttatattattgttttggtgaatttttatgtattttttaaaatttggtttaaatattttgtgtttggtttgggatataaatgatttgtgtataaatttttttttttttgttagatttttttttttaaatgtgaaagtagttttttagattataaaaagtaattgagtattttttttttaaaatgtaggaagtatagaaatgagaaagaatttaaaatttatttgtaagttagtgatatttatgtttgaggttttgttgtatagtttttaaaattttttttatgtttttattagattttgagggtagggttgttgtttttgtttttttttgtgttttttttttgttttttgttttttgagatggagtttttttttattatttaggttggagtgtagtggtatgattttagtttattgtaatttttgttttttaggtttaagtgatttttttgttttagttttttgagtagttgggattataggtgtgggttattatgtttggttaatttttgtatttttagtagagatggggttttattatataggttaggttggttttgaatttttgattttgtgatttatttattttagtttttttgattttttaaagtgttgggattatgttattgtgtttagtttgttttggtttttataaagaattttataaggggttaggtgtagtggtttatgtttgtaaatttagtattttggaggttgaagtaggtagattgtttgagtttaggagtttgggattagtttgggtaatatagagaaattttatttttataaaaaatataaaaaattagttaggtatgatagtatgtgtttgtagttttagttattggggaggttgaggtgggaggattatttaagtatgggaggttgaggttgtggtgagttgagattgtgttattgtattttagtttaggagatagagtgagattttgttttaaaaaaaaaaaaaaaaaaaaaaaaaattttataagatattaagtaagtgatttggatataataggtgtgttatgaaattatgttgaaggagtgagttattggtggtgagttgggatggtttttttgtggtttttgtaggtagatgtagtgatttttatgggttgtttttagagattaagtagaaatttttttggttaattttatttttaggatatttggttttttttttggaggttgtgttggagggtttagtgggtgggtgttggttttagtgtgggggttttggaaggagttagtattttaggagggagtgtgggtatttagatggttgaaggggagggagaggaagagaggtgttgtagagggtagaggtatttttgtttgtttttttgttttagggtttggtgaggtttgagttttatgttggtggggtggatttttggtttttgaggttttggttttgtttttggatttggtattttttttgttgtttttttatagaagggtgtttattttttggggttatttttggtttttttaggttttgggtggggatggttttgtttttttttttggatttttgttttttttttgttttttaatatgggtgtttttgggtggagtggggtggggttgggttgtagtatttagtattgagtttgtaagggttggttgttggtttagagttttttttattagagttatttttttttggttttttagttatattagttaagtttttttagagttgttttataaggtgggtgtttagtgtttgtttatgggtttggttttttgtttttttgggatgtttattgggggtaagagggaggttaggtttagtgtttagtttagttttgggtatgttttagttttgttttatgagttaattggttttgaattattattttattttttttagttttaattttttgatttgttaaagaggtatttgtagaggtggttgggggttgagtttttatgtatttatttattttaagaattaagaagggagtttatagtggttttggggttatttgtgaatatggatgtgaaattggggtggggtagatatggtagtatgttttagtagtttttttgtgatttagagggtttggaaatttttgttatgtgggtggagtgttgagggagtagggggttaggtttttttgagttgatgatggtgggtgtggttttttgtatatttggtttgtattgggttgtgtgttttaggggtagaatagggaggaattttagtatagatagtagggttgttagtatagtgttgagtatagggttaattaaagtatagggttttttggaattatttaatatagagtagtgaagaggtggttttggggaaagtggggttagagttgagtttgagtggggggtggggagggtgggtattagtttgtaagggagggatatttattgggttttagaagtttttggtggggattagggattgtgaagttggggagagggtgattattgtgatttagggaggaagggttttatagatagtttagtttttggttttgtgtttataggatattttatataggttttgagtttatttttggattgtggattttttgaggtagggtgtgtaggtttgtttagtattaggtgtaaggtagggggttttggtaagtgttgagggatttattggtgtttgatgaagtagtgagtttggattgtgttatgttttgggttttgagtttgtaggatttttttgtggggttgtgtgtttttgtttttggaggtgtttagaaggtattgatgtttttgttgggatgttttatttggaaggttttgttgtttttatttttttttatttttttgagttgtttgtagagggtatttaggtttttttttattttgggattgggtttttttttttttttttttttaagaataagtattttttttttttgaattgtttttggagttttttagatttaggtttagagtgggaagttttgtatgtgttgggggaataggaattaatgtgggaggattggttaggtttggtgtgttttttttgtggtgggatggggtggggttagagaatagagtttggttttagagtttaggaagagaatttttttttttgttggtttgttaagtattgtgtagtggtgagaggaaaggagggttggtttgggaatgtagtgggtgttgagtagttgtggaatattttaaatagagtgtagttgtggggaagggtggggttaggaggtaggtgttgggggtggtttttttgttttgttttttgtagttttgtggttttgattatttagtttggttttaggatggagttttggtttttagatatatggtattgggtgaggttgttttttagtatttgttttaggaagttagagtagttgttagaagagagaggagttgtgtttgtatttgttgttttttaggtttgggatagttgttgggattgagggtttgtataatggtgagtttgtttggaggggtgtgttgtggttagatagttatgttttgtgtggtgtggatagagggtatatttagttttggaggagtgtatttagattttttgttttggggtttaaagtgtgggtagtttttaattagattttggattttagtagatagtttgggaggatgttatgtggtttattttgatatattgttttatttgtgattttatttttgagagttgtagggaggtgtttttttagttggattttattttttttttggggttttttgtgggtgttataagtgattttgttttttttagtttaaggggggtttttggggtatgggttgtaattgataggttagagtagtttatggttagggttgagttttttttttgttttttttgaatattgggtttaggaaggggttaaagtggagatgttttgattaaagttgagggaggtatggagtttttttgattttgtttttttattttattgttgttattgggtgtattttgtggagttttaggatttttaaagaatttagagtggagatttttggttttatttagtgtaggtgagggggaaagtgatttgtttatagttatatggttattattagtatatttgggttaagtttgattttattttatggtttttgtttgaaatttggaattggaaatggttttggaaattattgattttatttgttgttttttaaaatggtttgtagaggttaagatatagatttttgtaatgttttgtttatttgtgtgtggggaaatggtagaggagtattggttttgtttttatattgtttgggttgttgtttttgttttgtttagtggtttttttttttggtttgtttttttattgtggaagtgggtataattttttttgtgtagtgtggttagagtggatagtgatgatttgtgaagtagggtggagtgtttgggggatttgtgttaaataagtatataaataaaagttaatataatttttatttaattagtaagtaggttttgtttgaagtttttgggtagtattttatgttatttttaggttttaggttggtggtgttgttttgtgttttttttatttgtaagttggtgtttagaagttttgttttgtgttttggtttttattttttttgtgatttttttttttttttattttaaaaagtaatgtatgatggggtgtggtggtgggtatttgtagttttagttgtttgggaggttgaggtaggagaattatttgaatttaggaggtggaggttgtagtgagttgagattgtgttagtgtagtttagtttgggtaatagaataagatttttatttgggaaaaaaaaaaaaaagtgatgtttagttatttttagatagaaaatgaagattatatgaaatttggaaagaagttttttttttttattttttaatttttttttaaggggtggttatgttgatagttgggtgtggtatttttttgaattttatttttgtagagttatttagggtttgtgtaaaaaaagttaatgtgtaaatatagattttttaagaatataaaggaaattagatttttgttattagtttttattttttttatttaataatattgttgttatttgtagatgtagtatgtttttttttttttttttttttttttttttttgatagagtgtggtttaggttggagtgtagtggtgtgattttagtttattgtggtttattgtaatttttattttttgttttttgtttttaagtgatttttttgttttagttttttaagtagttgaaattataggtgtttgttattatatttggttaatttttgtatttttagtagagatggggttttattatgttggttaggttgtttttgaatttttgattttgagatttgtttattttggttttttaaagtagtatgttttttttaatggttgtgttattagttgttttatggttttgttaggtttgtttagttttttattgtgattgagaggttgtaatagatgtttttgtatttgtatatgtgtatatatgattgaaggatgagtttttagtgaatttttgtgttaaggatgtgtgtatttaagttttgatttgttgggtatagtggtttatatttgtaattttagtattttgggaggttaaggtgggttgattatttgaggttaggagtttaagattagtttggttaatatggtgaaattttatttttattaaaaatataaaaattagttgggtatggtggtttgtgtttgtagttttagttatttaggaggttaaggtaggagatttgtttgaatttagtaggtagaggttgtagtgagttaagattgtgttattgtattttagtttgggtgatagagtgagattttttattaaaaaaaaaaaaaaaaaaaaaaaattgatttttgtttttgaattggtttttaaagtggttattagaattttttaggatttttttttttgttgatttgtttagttgtttgttgggttttgtgtagtgatggtttagtagggaggttttatgttttttatttttggttgagggttaaatgttttttaattggtgttttattttgtgtattttggttaagtgagagggattatttttttgtatgttataggttagggttttgtgttttttttttatttggaaggtgtattttttttttgttgaaattttttaaaaagagttttttgtaagttaggtgtgatggttaatatttataattttagtattttgggaggttgaagtgggtggattgtttgagtttaggagtttgagattagtttaggtaatatggtaaaattgtatttttgtaaaaattagttgggtgaggtggtgtgtttgtagttttggttatttgggaggttgatgtgggaggattatttgagtttgggagtttgaggttgttgtgagttgtggttatattattgtattttagtttgggtgatagagtgagattttgtttaaaaaaaaaaaagagttatttgtatatttttattatagtaggtatgagtattttgtttttagttgtttatttttgattttgtttttgggatgtttttttatatagaatattttaattttgatattgttaagtttttgtttttttttttagtttttggaatttatattttgtttagaggttttttgtgttttgaaattataggaaagaattttatttatgtttttttttagtatttttgtggttttatttttatatgttgaaattatgaatttattggaatgtattttggttttagtagtgaggtaggggtagatggtattgtttggatatatagtagtgagtttggtttggagtgggtggggtgtgtgtgtgtgtgtgtgtgtgtgtgtgtgtgtgtgttatttttattagttttggtgtttgtattgtgttggtttagtaaaaataatttggatgtattttttttattttttgttttttggaatattttaagtagtaatataataatttttttgttaaaattttttaagaatttatttgtgaaattatttgagtttgatatttttgggggagtttagtattttaaaaatttaaattttttttatgggtttgtgagtttgggagtttttttttttttttaaaatttattattattttttttttagaaaagtgttttttagtttatttaaaatttgttagtttattttgagggggttgttttagtttgtttagtgaggatagtgtgtagtgtggtgattgatatgattgattagtagagtatgattgattagttggtgtgtaaatatgattgattgtggttagtgttttgggatgttttatgttgaggtatatgtgtgtagtgtagggtgatgtgtattttgagaggggatgaagttataggatttttgtatttttaggagagagtttttttttttaaggttgtagttttgagtaggtagtgatgggattgggtttagggggttgagtggttttagtaggttaagggttttaggaattatgagaagtttggagttgtttagagagtagtttttaaaattagtttggattgtagtttttagaaagatatgtgattgatattatgaattaggatatatttatatatggggtgggggtggggatgggatgtattaatgaaattaaatttttgtgatggaatttttatttttattatgtgtgtgttatatttagtatttttttttttttttttttttttttttttttttttttttttttttgtttgtttgttttggagagagggaaggtttttttttatttttttttaaatagttttattgagatttaagtaagttattatataatttattaatttatttatttatttatttttttgagatggagttttatttttgttgtttaggttggagtgtagtggtgttattttggttgattgtaatttttgttttttgggtttaattaatttttttgttttagttttttgagtagttgagattatagatatgtattattatgtttggttaattttgtatttttagtagagatggggtttttttatgttgaggttggttttgaatttttgattttaggtgatttatttgttttagttttttaaagtgttgggattataggtatgagttattgtgtggtttaatttatttatttaaagtgtataattttatggtttttagtttatttagagagtagtgtaattattgttattataattaattttagaaaattgaaaatttgagaaatttagaaaattttttttttaagaagaaattttgtagtttttagttattaattttgttttttttttttatattttttttttatttgtgtggattttttttttttttttttttttttttgagatagggttttattttgttatttaggttggggtgtaatggtttaatttttgtttattgtaatttttattttttaggtttaagttatttttttattatggttttttgagtagttgagattataggtttgtgttattatgtttggttaatttttgtattttttgtagagatggggttttattatgttgtttaggttggttttgaatttttgggtttaaatgatttttttgttttggttttttaaagttttggaattataggtgtgagttattgtgtttggttgattttagatattttttgtatagagaattgtatgtttggtttttgtgtttggtttttttatttggtgttatgtttttaaggtttatttatattgtggtaggtgttagtgtgtttttgagtaatattttattatggtatggattattttattgtggatagatatgttgtttttattagttgagggatattgggttgttgttattgttggtgagtgtattttttttaaattaaaaaaaaaatgttggttattatttattagattgtttttttggtttatagggtgggataagttggtttgggtgagggttaggaggtggttaggtggaggtggttggagtggttttgggttgtttttgggtgtagtaggtagaggtgtaatggtagagtttgagtaggttttttgggtggatttttatgttggtaatgtttgtttatttaagaagttttggttaggtgtggtgttttatatttgtaattttagtattttgggaagttgaggtaggtagattatttgaggttaggagtttgagattagtttggttaatatggtaaaattttgtttttattaaaaatataaaaattagttgggtgtggtggtgtgtatttgtagttttagttatttggtaggttgaggtaggagaatttgtttgattttaggaggtagagtttgaatttaggaggtggaggttgtagtgagttaaaattgtgttattgtattttagtttgggtgatagagtgagattatgttttaaaaaaaaaaaaaaaaagaaaaaaaaagaaatttttagtgttgttttgtgtttggtattgaagttgagggaaggtagtattagtatgagtttttagtttattgggtttttgtttggagttgatgtgtgattaaggtatatgagggaagtatggtgaggtggatggtgtggaggtataaggagtaaaataaggtagatgtagtggtttagtggtttttggtggttgtgaggagtgtgggtaggatagttttaggagggtatttggagagtagggttggttggggtaaggtgtgttaggtatttgttaggagtaaaatgtaaggggatattaaagagtttaggaattaatatagatagtatttaatgtagtattttttaatattgaaatgatgtatagtaatttttatgatgaataaatgttggaattttaaattaagataggtttagttttgtatgtgtatagttttgttagagtttgtttagtgtggaatttgatttgtttaaaatgttgttttaaaatattgtttgatttttggattttttggtattgttttaatttttgtatttggatgaaggttttattttaattttagttggagagggttaagggttggtgaatttggttttggatttgtagagtttgtggtatttgagaggtggggttaggaataggaaggagttggtgagaatggtatttggtatgggatggggttagattagagtagtattgtggttttttttaatttgtggttttgttgttggatgtttggtgttggtgttgagtttttggttttttgaatggagtgtgatgaataatggggttggggagtttttgggtttttttttgaagtagtagtgaagttagggatatgttggtagtaggtagggagagggatgtttggtttgtgtttggagttagttgttttatggaggagttgggtgaggatgtggtgggaggaagatttttttagttttgtattttttgaagtataattgagtgtttgtgtggtttgggggttattttggtttgaggatagttttgttttgtttagttaggttttgaagagttattgggatatggatagtagttttgttgggtggtaggttgtttatttttgtttatttaatgttggaattggatgtagagtatttggatggttagttttagagtgtttttgatatttttagttattttattttttagattaggataagatgtgggattttaattttgagttttttatgggttttattttatgtgtttttataagttattgggtttattttttggttttagggttgtttggttatttggtattttggtttttttatttgtataatgaaaataatagttttagtttttttgaggagttataagatgttttttgtgtgaaaaattgggatttggtattagattatttggatttgaattttggttttattttttttaatttgtggttttgggttaatttggtttttttgtttttagtttttttatttatagagttattttattgagttgttgggaggatgaatataaggaagtgtatttatgtgtttagagtattgtgattttatttattattattaaatgaggtatataataagtgtttaatagatgtttagtgttattttatggattttgtgtgttttgtgtgtttttagtagttaagttttggaggtggggaagttgttgatgagttgtatgaggtaattagaaagaggaggttataggtgtaagggtttgggtgatatttgtggatagagagaggttgatggattttggtagaggggaagggggtttttgtatatagaaaatgttttttgtatttaagatttttgtgattttggaatagaggtagtagaggtttgtaaattttaaattataaatttagaaagtatagaatatttgtagagaggattagaaatattatatattttagtgtgtatagaattttttatatagttaaataaaagtatgtttttaattgaagttgttggagagtttttgaggattttatattagataagggttggtaagtggaagtttaatatgtaggagttattttttttgtttataaatgtttgttgttttttttgtttatatttgtatttatgtgagggtatttataggtttattgtttagttttatgttttgtttgttattaaaaaattttttaagaattttttagttgtaaatttttttattggagggggggttttaggaatttagttttgtttggggttggggtattttagtatttgttgtataggtgttggttattaaaggttatgtgttgtatttgtgggtttttggggtttggtggtatttgggtatatagtttagtggtggttttttatttgttagatattgggagtggggggttttttatttttgttttttggtggtggggggagtgttttgagttgttatatattagaatttattgatttatatgttgtggtattttatagttttttgatagttttttagtttgagagattattaaattgagtttttggagagggtggttgttgaggtttggatataggtgtggataggatagttttgttttattttggagttttgttttggtttagttttttgtgggtttgaagtttaggttgggttagtttttgttttttagatggttggaaaggtagtttagttttatggtttttttgttaggttttgagagttgtttggtttttagttttgtttttttttttttttaagatggagttttattttgttgtttaggttggagtgtagtggtgttattttggtttattgtaatttttattttttgggtttaagtaatttttttgttttagttttttgagtagttgggattataggtgtgtgttattatggtaggttagtttttgtatttttagtagggattggtttttattatgttggttaggttggttttgaatttttgattttaagtgatttgtttattttggttttttaaagtgttgggattataggtgtgagttgttatgtttagtttttagttttgttttgatttttttttaaggttgtgaggatgtttatgtttttttttttttttatggtttattgatgtttttagatgttttgtaaagttattttttttttgggagttttttagttggtgatgggggattttttggggattattgtttaggtagttatgtaggtttgtgggttgtgtttttaggttggattgagatttggtgtatggggtgtttttggtttgagttgaggtttttggaagttatagttaggaggtagtaagggatggttgttatgtttttttttttttgttttttagggtttttgtgggatagatttttttgtttgagttttttggttgtttatattttggttttttaaagtttagtttgaagttttaggtattttataatttgttttttttagtagtttgttttgttttttttttgttgatgtttttgaaatttttttgtttttttttattttttggttagagagagattggagattttgtgggaatttttgaggggagggagaaggttgttgtttgaatggaggtggtttttttttttgtttttttttaggtgggttatatttgtaggtttagttttttgttgtggtagtgtttggggtgttggttgttttttgggtatgagttgggagttgagggaggtgtttttaggattggagtggtaatttagttggaggaggagtaataggtttgtggttagtagtagttgttgtagggattttggtgttgtatttgtgttttagttgattttttttgtttttttagggtgggttggggatggtggtttgttgtttagtttaggaagaagaggggttgtaattagtagtagttattttaggggattttagtgttgtatttgtgatttagttgattttttttttttttttagggttggttgggaatggtggtttgttgtttagtttaggaggaagaggggttgtggtttttattttagaggttttttttttggttttttttttggtgttggtttaattgtaggtttgttttaggttgtgttggtatttgttgattgatgtttagtggatgttgataggagagggttgggatggggaagtagtaagttttggttattgtgggtttgggttatagatggttgaggtattttttggttatttttaggaagtaaggttttatgtagtttttgatttatttattgtttgtgtgtattttaggaggttgtattttttaaggtttttattaggtaattttattgggttgggtgttgttgtaaaattatttattgggtgtggtggttttttggtggggggtatggttggggaggatgtggtggaggagaagttagttttgtggttggggggagggtggattatttgttttttgtttgttttttgaattggagtttatggttttttttttaggtgtttgggttatggaagaggttatagttttgttttatttttgtggtagtttaggggagttttggttagttttgtgttttttgggagggtgatagtttggttaggttgtagggtaggattggaatgtagatttttgtttggttatgttgttgtttggttgttttgtttggggattttttgtttaggaagagagaagtgggttggatagtttggtttagtgattggaagtttagttttttatgtttagtttagtaggaagtttgtttttttggaatatttgtgtgtttttgtatgtgtttttttggttggtggttttgtgaggtttttattgggttgtgttatgttttttggttattttggttttggtgtttggtttttgtgaaatagagatatttgggtagttttttatttgtgtttgtaagtttgtgtggttttagtgatggttgattttgttttatttagaggatttgggaatttttagtttaattgtttagaggagttttttttagtggggagagtttgagttgtttttttggtggatagttttttagattttaggtggatttttttgttggttgttttttttgttgtttttgtttttttgttttttatttgttttttatttttttttttgtagtagttagttggtatggggatttttttttttttttgggattgtgaatgagatgatttttttggtttttttgggtttagatttttttggtaatagttagtgaaatttttgttttaggtgggaggagaaggtttagtatgtggttataataatggttttaattatattatttttaaatgttggtttttatttattttttgttttgtttaatagttatttttattattttattttttagattaggaaattaaggtgtagagagttttagttatttgtttgaggtttttatagttaagtgtttggatttgaattttggagtagtttggttgttgagttgttttggagatggggtattgtgtagtggttggggtaggggtggagttttgttgttgttgatttttgggttatttggagtgataatatagtttagtgtttgggtttttgtttgagattttggttggatgttaggagtttgagattttttagtttttttttgtgtaaggtgttatggggtgaaatgaaagaaaattttagttagaaggtgtttttttttttttttagttttttagttgttttggattttgaaataagatattgtttgtttgtggggtgagtaggaatagattggaattgtatttttttttttttagttatagttgttaggagtttatttttttttgttttttttttttgttgtttttttttataagattgggttggatgttgttgggaaagttaataggaagttttttggttgtggtggaggtgggggtttgtgtttttttggggattgagatgagggttttaggttggttttggtaagagtagggaggtttatgtttttgtttgttggttttgttttttgttttgggagaaggtatttatatgttttagaatgtattttttgtgtgtatagggatggtttttgggttatttatttgaggtttattgatttttttttttggaattggagtggtttttttatggtggattgggttgagttttttgttttggttgatgtttttttttaggtatttttttttattgtgttagggtgtaggttgttagtggatgggtttttatttttggggattggtagttgttatgtttattttatagttgagatattttggttgaaggttttgttaagttttatggagtgtagggattttttttgagatggtttttttttgttgtttaggttggagtttaatggtttaatgttttgtttattgtgattttgattttttaggtttagtagtttttttattttagtttattaagtagttgggattataggtgtgtgttattatgtttggttaattttttaattttaatttttttttgtagaaatggagttttattatattttttaggttgaattttaatttttgggtttaaatgatttttttgttttggtttgttaaagtgttgggattttaggtatgagttattgtgtttagttggggtttttttttaattttttttggttttttttaggtgtaggatttgggttttagttttatgtgtttttgaatagttttgggttttgttttgtattttttgggtgtgtggttaggttttttgtgatattagtaggagatttaggtgaagaagtaggtagaatggaatgtttgtttatttagttttggggttaggtggggtggttaggatagtagtagtggttggtgtggttttttgggaggttagtttattggtgtggttagtgaatggggaggggagtttttttttttgtttttttttatttttggtttttgggtttttagggttaggtttttagagttttaggtggaggatggaggttagggaagttggggtaagagtgggttgggggtgggtggttaggtggattttggaaaattattttttgtaggttttgttttttttagggagtatttagggttggttttggggagttgggttaatggttattttggatggtgtaggggtttatttttatgaaattgggtttatttttatgaaattgggtttatagaagtttttggttttggttttgttttgttttttggtttttgtttttaaagtaggatttaggatagttttgaattttttgttgaaatgtagttttttgggttttaatttagttttttagaattagagtttttggggtgggttttttgtttgtttagtagtttttaggggatatttgtgtttgttagagtaagtttaataagtattgttgtaaattttttgtttttatagttttttggtttgtttttttttttttgttgggatttgtattaggattaaatgttaatattagggattaggttatatttgtgaattttgagataatatttgtattttttttttttttgaggttgttttgtttgttttgttatttaggttgaagtataatggtgtgatatttatttatggtaatttttatttttagggtttaagtaatttttttgttttagttttttgagtagttgggattataggtttatattattatatttggttaatttttgtatttttagtagagatggagttttattatgttggttaggttggttttgaatttttggttttaagtgatttgtttgttttagttttttaaagtgttgggattataggtgtgagttattgtgtttggtttgatatttatattttgattaagttgttgtggaaatattgagttttttttgatagttttgtttatagagtgaatgtttaggaattggtgaggtattttttatttttatttagatggtggtttggaggtagtgtttttgattttgtgatgggatttgttttttttgtttaagagattttagagatgtggtttttgaatgtgggggtttttgttggggtgggaatgggagttggttttggttattgtttagtgattttattttagtgttttgattttagtatttttgattttagtgtttttttttttttggttttgtgtggagattatgtggtttgtgttgagtaattttttattgtttttgttgtgtttttgttgtagggaagtttttttagggagttagttgatatatttggtttttattatttgtttttgaataggaatgaaaggagagagtgagtaagaaagtggtaggaggtgggggttgtagagtaggggaaggttagagagaggggaggaaagatttggaaagtttaggtatgtgttttggaagtaggtgttagtgatgagtttatttggagggtggttgtttgttttgagttttgtttggggttagtagggaatattttgttagggtatgttgttgggagtttgtttttggtttattttttgttgttttgagtgttgagtagatttgtttttattttagggataatgtaaggaggttgttattttattttttattttattaatattttatgaattataagtgattatttattgtgttttgatgtattttaggtgttgggtttgaagttttatgtgttttatgggatgtatttgtattattgttgtagaaaatggtttttgttattattgtagagaaggtattgaggtatagagaggttgaggaattggttttaggttatatagttagaagtggttgattttggttgtgaatatagggttgtttgattttaaagtttgagttggtttgtagtgaggtttatggtttttgtgttattgtttgagtttttggttgagttttttggtttagtggggggtttagtgatttattagttgttttattatatgttgtggatatttttatggtttatttgggtgggagggaaggggttttaggaggtgggaggggtatagggaatatagtttagtttgtttgggtttaatattttgatttttaaggtattttttgagggtagtatgaggttaagtttttgtttttttttaggattttgtttttgtgagggttttggggttttttgtttttttttgggggttttgttggttaggattatagagaagttttttgttgttgatttttttgtttttgtattttttggtaagttattttatgatttagttgttttgtttgtaaaatgggttgaataatattgttttgttttggagggtttttgggaggattaaatgagatttgttgtatagaagttttttgtaagttatgttgattggtggttgttgggtttttaagtgaatgggtatttgggtattgagtgtgtggatttagtatttggaaggaggggttggggggtatttagaatttttgggaggtttggatttttgttttgtttagattttgagtttttttttggttagtttaatttttattagtagggtgagggtaattaggatttatgtatagttgggtgaagttgagtgattatatgtggaagtttagtgttttttatgtaaagtgggtaggtggttaaagtgagttttgttttagtttttttatttttggggttgtttttggtgttttgtttttttttagagttttattgatttgtattatgtgatttgggtttgggaagatgggtttagttgtgggaggttgtgtgggttggggattgagagtgttggaggagggttttttaggaaaatttagttgtataggaagttgggttagtggtttttggaagtttttgggttttgtaagttggattttttagatttgtggttgtggggtttttttttgtttgtagttgagagtttttgatttgtatttgagggttttagaggtttgggagggggatgtgattgtgtttttagggtgaagtttatttgagtgttattttggatatagtttttatttttttttggttttttttttggttatggggatgttgtttggggggggtttttttatatggaaggagttgtagttgagttggtgggttttgtatatttttaaggttgtttgatttttagtttttaagtggggttgtatttattatttaggatttggagttttagttagagagggattttttattgtttttttttttgttttttgggaaaggtagggtttttgtgtttttttttatttagggatttggtatgttgggaggttaagaggaagttgttttttgtttatttattttttaatttttttagttagtagagttttatttgtgtgtttagaatttgtgtgtggagttagaagttataaggttggtttagttgtgtttgattttggttgtgtggttttggatagttttagtttttttggagttgagtattttgatttgtagaggagaggttgttgtgttggttttgtagggttttgtgtagaggggagtgtgtgtggttgtgagtttaggttatgtttttagattggaggataggattggaatagtgggttaggatggttagagggttttagttttaggaggaggtttttatattttttagtatttttatattaggaaatgtagttaggtttttaggttttttatgttaggaagtagtattttgttttttatttttggttgtttgggtttgagaagttgagtattttttttgaatttgagtgttttttgatttttgtttgggtagttgttttttttgaattgattgtttgttttatatagttttttgtggtttgtttgatagggtggttagtgagttttttgtatagtatattttttttaggagtgttgtttgtgatgatggtgtaaagggtgtttttttgagtttttggaggtatgtagtggtgtaatagtgtgagtttaggagttttggtgagtttttggatggagaatttgtttagattattttttagtttaaattttttttgggtgtttgttgtgtttggggtgttgatttattgtggggtggtttgtgagattttatgttatttggttattttttttagtttttgtttattgtattggttttttggtttggttgtttttggaatatgagggtttatttttatggaagaatatttatttgtttttttttggaaagtttttttttagattttttggttgttttatttaggttttgttgaagtgttgttattttggagaggtttttttgttatttgtagttaaaatagtttttttatgtttgtgggtggttttttatggggtatggatgagtattggagagttttgttgtttatttgtttatatgttttttgggagggtaggggatattgatttgtgttgtgggtgttttgtatgttatgggtgtttagtgaatgtttgttaagtattaggggagtataaaggagggaagtttttgtttaattggagtagttagggaagattttttggaggaagtggtatttggtttgtttagaatgtggtgatttgtttgtatgtagatattagattagagggtaaaggttattattataatttagtagatagttataagtagttaaggaattgttatgatatggattgtttgtgattggagttaagaaggagttagagatagaggtttttgtgttttggtgtgagtttttgggggaggttgagtttttagaatgtggggttgtttgtgtagaggttggaggtgggagatatatttgtgagtgttggtgagtgtggggtgagttattggggttggattagaagatgggaatttttaaatttattaattagttttggtgttttgggagtgataggagatggggtttttgggggattaatttagtataagtggatgagatgggatgtaggggaaaggataaagttttttgaggttttgggaagttgagttagggtagagttatgatagggtgagttttagaagtaatataagaaaaaatagttagattgggttttttttttattgtgggagatgttttattttattttttttgttttttgggttttggtaatgggttgggtatagtgaatgggttttatttgtaggagtggttatattttttgggtatagttgttttatatattgtattgagatgggatttgaggttgggaagaatagttttttttgtaggttgatattgttagtttttggggagggaaggatggtagggggtttggagtatttttttttgttatttatattttgtgtttgtttgtagggttttgagttttgtttgttttgttttagttttggttaggaatttgttggagtttataggggtagttaggttggaataggaggagattaggttggtaggggagttgagagggggttttggatagtatttagggttgagttattttgggtttgtttgatttgttatttggagttgtttttgtttgtttattatgtgtaaggttttgatttatttgggtttgtttaattagtgtttttttttaggtttagttagtttggtttttgtttgatttatttattgttattagtgttatttttgtattatgtaattagtttttgtagtatgttagttattaagtttagggttttttgtgtattttttgtaatttttatagtaatttgggaggtatagagaggttgagttgttggtttatagttatatagtaggtatggggtattgttaggatttagttggatttttgattttagggtttttttagggttttgggtgggatattggtaaggaagtaaggtatgaatattggttttgttttggatagagtttggggatggtggtttggtaggtttagttgatatagtgattttggtgtaggtttaattattggtaaagtgtttaagtatatatagaattttaattggggagataggtgaagtggttaagggagggttgtgagtgataggtggatattgtatttattggtagattagttgattttggtgttttttggagttttttaatttttttatttagaaaaagaggaattaatagttttatttttaaattgggtgggagtattatatttgaaattgaagtaaagttggttgtgttataggtttggtagatgttagttgtgtaggtaatttagtgattatttgaagtaggttgtgtggtggtatttttattttgtagatgtagtttagagaggttagggtattaattttgggttatatagtgatagtttaggttatagagagtagtgttggatgggagggtgttggtagttttaggtataggttgggagggttgtggggttagtagagggagggtatattttttagttggtggggtttttttgtgttttagtatttatgtgggtttaaaggagttggaaggagggaggttagagttatttatgggtttagaagttgataagtaggttattgattttgaatttgttttattgtatgtaaattggggataaatttggggatttaatgatataatgtaagaagtagatatgttatagttttggttatatagttagtgtataataagtggtaagttgttagaggaggtagttggtgagaatgggagtattttagtagttttttgttttttgtttttggttgtagatgtatttgtttttggttatttgtgttttagttttgtgttttttggtgtgtgtgaggttaagtttttggggtggggatttgggggtgtgtttgtagtttttgaggttaagattaaggttgaggttgaggttgaggttgaggttattttggtgaggaggaaattgtaggtggagaagtttgttgattgtgattttgatttgattgtaattttgatggtgttgatgttgttagtatgtaggttttttgtttttgttatgattggtttttgtagtttatttggttgagaggtgtgttggtttttgtaggttgtaaaatggggatattattgtttgtttgggttatagtgtgtttgttgattgtatttggggagggattgagggttgattgtgttgtggggatgttggtagagaattagagagggtatttaaaaaggttaatagtttggtggggagaggaggtgtaaggttggtttttgttttttgggttttgattgaaagggaataggggatatatttggggatagttttttttttggaggaagaagggtttagggtgttggtgtggagtttgtatagatggggataatgagttggagggtgttgggtaggagttggttagtaataggttgatgagggaggttttgttggttgggtttggtttttaagtgagtattttgagttgtggggatttagggggttttagagattttagagttgagatttgggattatagaggggtgggttgtgtttagggtaatatagtggatggggtagatgttgtgaaatttgtttttttgttttttttttttttgttatagaattggatttttttagtttatggttgttaaattttttagatgtttttgggttttatgggtgttttatattggtttttttgtaggatagtagattttgggggttggttttgatggtatttattatggggtattttatgtaagtatagtgtttttatgtttagttttttagtttgtggagtaggtttgtgtttggttagttttattttgtggttagaggagggagatagtggttttggagataggagttggtttggggttgtttttttagtttttgtttttttagtttatttttttgttttgtgggtgttggttattttttttttgttagttttatttttagttttttttgtttgagttgtgatttgttagtagggggtagtggaggttttgaaagtttttggagaggattttgaagtagtttttataaatttgtttttggaaagttttttttgttatatttttagtggtttttttttttttaatattttttttggggttgttatgtagtggggggtggaggaatttattaggttgtggatagagtagagttatgttgatataaattttggttgaatttatatgttttttatagttagtggttgattattggaattagggaagtgattttatagtaagggtttgtagagtagttattatgtatttttgattttggtttttggatttagttttggaaaagaagttagattttagttatttggagttgtttagggaagattttagtttggtgttggttgatagtttattggaattttttatttgtttggttaggtgatgttaaggggtagaggttagaagtgttaagaagtaggttgagggtggtggtttatgtatgtaattttaatattttgggaggttaaggtgggtgaattttttaaggttaggagtttaagattaggttggttaatatggtgaaattttatttttattgaaaatataaaaattagttaggtatggtggtgtatgtttgtaattttagttattttggaggttgaggtaggagaattttttgaatttgggaggtagaggttgtagtgagttgagattgtgttattgtattttagtttgggtaatagagtaatattttgtattaaaaaaaaaaaaaagaagaagaataagaagtgttaagaagtatttgtttttttgattgaaaagtaatttttgttgggtgtggtggtttatgtttgtaattttagttttgggaggttgtggtgggagagttgtttgaggttaggtgtttgagattagtttgggtaatagaggtgttaggggtagtggtgtttgtttgtagttttagttttttaggaggtttaggtaggaggattgtttgagttaggagtttgaggttgtagtgagttatgattatattattgtattttagtttttgggtgataggatgagattttgttttaaaaaataaaatataaataaaaaattaatgtttattttttgtgattttaaaaattatatttatttgtgataaaataattaaattagaaaatgtaaaggaaatgattaataataattgtgttttttagataaatattgttaatatgtttatgtttttttttagtttttttttatatagatatttaatatttattaatttgttttgaattaaagatggttttttttgttttgtatgagaattattttagttaggtatggtggtttatgtttataattttagaaagttgaggtaggtagattgtttgagtttatgagtttgagattagtttgggtaatatggtgaaattttatttttataaaaaaatataaaaattagtttggtgtggtggtatatgtttgtgtttttagttttttaggaggttgaggtaggagaatagtttgagtttgggaggtagaggttgtagtgagttaagattgtgttattgtattttagtttaggtaatgggagtgaaatgttgttttaaaaaaaaaaaaaaaaaaaaaaaagttgttatgttgttattttttttagggatttttattttttttattttttgtttaagatttgttttgtaaaaggatgaggttaaatagttatgggagggtggtattggatgtttaaaaaaatgttttgtggttggtgggatttagaaataggttggggaggttttagtagagggtggattttagttgggggtggggggtagtaggggggttttttatatgttttttttgtgtgttttatggggttgtttgtgaggttgtgtgaattagagtttggttgggaagttatatgttatttggattttgattttttttggtagtatgattttagttaatatgtttaattatgtttttttttgtaaaatgggttaatagaaatgtttatttgagatatgatgagaaataaaggtgtttatagagtaaagtgtttagaatggttttggtatgataggagtttatatgttagtgttgttgttggtattgttattattatggtggtattggttgttttgttttttttttgtttttgttattttttttttttagtaggtttttatttatttgtttatttatttatggttgaggttttgtttgtgttaggtttggtgttgagaatgggggtagagagatgggggttgtgttttgttttttgatttaagggttttttttgtaatgtgaagtttttggagattggatttttaggttgttttattagtttttttttaggttagtttaatttttttgtgtttgttttttgagttgttagaggaagagagtgggaggaaggatggagtggggtttttgtggggattgagtggggggtgtgtgaggttttggaaatggtgtttgtggtatttatgtagtattagtttttgttgtagttgttgtttggagaatatttttggattttaggatattgatgatagaaggtggaatgttttttttggaagttattaagaggggattattgtggtggttgagtagagttgttgatttgtgagttgtggtttgattatagttattgtttttatgagtgaggttttttgtggttttttttttaggaatttttggttttttggtaggggatagtttagggttgggggtgggtagtggtgtttgtaggtttttttggagttagagaattttttgttgttgtggtggggttgtttttttttgtttttttttttttgttgtgtttttagttgttttgataggatgtttttggtttgagagatagaaattttaattttgaatggttttagtttttaagagaatttggagtttttttgtgtaaaatgagatgttttgagtattgaggatgttgtgggggattttttattttattatttttagttgtggtgttttttttggttataggatgttgtagttatgttgtagggaaggagagtttttttttttgtgagtttagggagtttttttatgtagtttttttattggttattgtttgagatttgatttggtggtttttgttttaaggagtagaaagggggtttgttaggttagggtggggttgggtgtgaggattttttttggttaatagggtttgtttaggtgtttgttttgttggggtagtagggaagggatttatatgtggtattgggatatggagaggtttttgtgtttgtgatggttaaaagggatggtgttttagttatgtttttatttattttgaggtttagtatggttatgttggaaatagtagtattgttttttttattgttttggtttgtttttaataggttagaggggtggggttggagtgggtgtttgatttgtggttggatttagttgtttgtggataggttgtgagtgaatttgtagaggaagggagatgggaatgttgggatttttttttgtattttttgaatttttgttttttgtgagttagatggggagtgtatttttgttttttttttttgggtattttttgtgttttttgttttaggtatttgatgttgtttgtttattttttttttttgttttttttgttggttttttttatatggttttaattaggattttttgtttgttggtggatgggtagagaggggagtttgttgtggggttttttttgattgggggattttttagtatagagttttttggtttttgtagggatgttgtgtgtgtttgtgtgagtttggtgtgttagaagtgttaagttgtagttgttttgtgtgttttttatattttttattttttaaaggttttgggtttggtgtttgtgggttggggatttgtgttggggtttttaggaggtttttggtgggagaggtagggtttttttttttttaatttgggtaattttgttttggtttgttgtttgtggaaagtgttttaggatatggtggtaggattggttggggttttggttttaggtttagttttagtttttgttagatttattttttttgtgtttttgtttattttgtttatttgtagggtttgtaggagtattttgagagttggtagggtggtttgtttggtgtttgtatagggtttgttggtgggtggttgaggttgtggtgaggtttttatggtttttttgttttgtatattttttttttgttgtgttgttttgttagtatatgagtttgtattgtttttgagtttgtagtttgttttttttattaggtggttaagtagggtggtagttagggtggtagagttttattggtttgtaggggattttttgtgggttgtaggtagttttttgtggttgaaggtgttttggtaggatttgtattatgatttttgttaaagtttatgtttaaggtatttgtgggtatttttgttttagatgtgagggttggtatttttttttgtatgtgaagtaaaggtttgtttgaaggagtgtgtggaagtttgggtgtgatgaaggtaaggattggtggtttattttttttgtatttggattttgggtggtaggtttggggtttttagtttttaatttaggagggtagttagttgttggaattaagagtgaattttagttgttgttgttatagttggagggaagaggggaaaggaggtgttgtaggggagtagagattttattttttttttgttgatattaggttgttggtgttggatggggttttggtaattgtggtaggagtggtgatgtttgatgatggtaataagggttttttgaggattttgagttgttttaagggttttttatttggagtaagtattttttttaatttttttaataatattgtgaaattgattttgttgttatttttattttattgatgaggaatttatagtttagagatgttaagtaatttgtttaagtttttttttgagtatggtagagggagggtttgaatgtggaaagtttggttttagtgtttttatttttaattattgttatttatttttttggttagttttttgattgtaaaatttgaggtttagaggagtgtagtgatttggttagttttgtatggtaggttagtggtagagttgagtagtgttttttatgttttgattttgtggttttttgaggtggtttatttttaaatatgttttttatggtggttttgttttttttttttttttgaatttgttagtttgtgtttaggtagggggagaagtagagtaattatgttgggtgggttgttgtgttttagtgttgtttgttttatatttgattggtagtagagtggtttttttttggtgtggtttggaggtgttagtggttatttattagtatagtttagttttatatatgttatttttaaaggatgttgatatagaatgaagtagttaggggaggtggatgttttggtatgagggtggtgtttttggtaatttgtagtgttgttgtttgtggttgtttttggttggtattttatttttttttggttgttttgtagttatttgagggaggttagtatgttgtttttattttaggatagtgtgaatgtagtagtgtaagtttgttagtgttgtattgtgggatttggaggtttttgtttttgagttttgtttttgtgtaatttttaaagtatggattttttaggggtttttatttttttatttggaaaaattttatattgtttagggtttgaggtagggttagagtatggagatgttgttggaggattaagggagaattgagtgtgtgtttttttggttttagttttgtgtgtgtgtttatgtatgggtattttgttatttatattggtttttatggttgggtgggagttgagttgagtttggtggttgtttttttattttgtgggtttggttggggagtgtgaggatgtttgttggaagttaatgtgtatgaaagagttaatggtggattttatttttttagttttttttttagtttttttagggaaagggtaggaatagagaggttttatttttagaggaaggggtgggtggggatatagtgttgtttggtatagttttttttgagttattttgtatgttttattttattgatttttgtagtttagttgtttagagtggatttagaaggtggagagagggtttttaataagtagaggatggagtgaatgtgagatttattattgggatttggtaaagtaaagagttttattttttttttgtagatgggatgggggtggggttggagttagtggggtgggggtatttagtaagagtttttttttatttttttattttttttgttatgggtttttttttttatgtagatttttagtttggaatgattagtgtttagttttttttgttttttttttgttttgttggagggagtgatttggtttttggttttggttatttatattttttgttttgttgtattagttttgtggtaggggttgtggtggaggtgggtaaaagttgtttttgggtagttagtttttattttgggagtgattgaaagtttttgggggtttttgtagggtgagttgtttattttggttttggtaaggatatttaggagagggttagggtgtttgtatttggggtatagtataaagaatagttgtaagtgttttttaggtaggagggtgttgaagtattgggaagttgggatttagaagtattgtttggggtggtgagtggaagatgtaggatatagatttatgtgattgtgtagattatttggttttatttttttggtttatagtggaggaaattagaggttgagagaggtgaagtgagttttttggggttatatagtttagttaggtttagggtgttgattttttgttttgtttttttgtgtttatttggttggtattagtatttttgttttgatatttttgtgtggtagttgttgtgattttgtgatttttttttattttattttagtggggttttgtgagggaaagaagaatgttttatgtagaagtggttggaaagtaagaagtttggagagaagtgaggtttttgtggtttggtttgagtttaggatttatggtttggtttttagggatggagtattgattttttttttttatatttttattttatgtttttaggagttttttatggggaagttggaatggatttgggtttagagattgtaaatttattttgttggatgtgtggttgtttttatgtaattaatttttttatggagaagttaggggatggtttttagtatttttgggggttttttagtgaggtgggaggattttgagaggttaggaggttgtttaagattttttgttttttagggattaggtgagggtttgttgattgttttgattttttgatgtttttggtggggagattttagaggggtttgttgttattattgttagtggttttggtttgtttagttatttttttggggtggttaaattttatgttgtaaaagtttaagtgaattttagtagtggtttgggagaattatttgttatgagttaaggatggagtttttggggaggattttttgttgttttttaattttttttgggtatatttttttgtagttttattttttgtaagaaagttaggtgttttttgaagtttttttttggttttaggttagaggtgatagtgggggttttttgtttgtgttggtgattgtggttggttgttggtgtttggttttgttttgtattgtgtatttattgaaggtggtattatttgggtttttttggtggttatgtatgggtgagtagtttatgatatatttgtttttagtattgtgtgggttggggtttttagaggggttgagggtttggatggttttgtaggggggtgtttttggttttgtgattgaaaggagttgaaggtttggagaagttgttgggttgaggttagtttttatagatttggtgaggagggaatagatgtttatggagttgttttaggtattgtatatattgttttattttgtgttgatagttaagaggttggttttttgttgatttttattttatagataatgtgtttttttagttttttagtggtggagttaggatttgaatttatgtaggtagttttttgggtttgtagttttattttttatttttttttaggatttatgttttggggttggtaggataatgatttttagagttgagtatattttaatttttagtatttgggattatgttaggtgatatggtagggttagttaaggttattaattagttggttttaaaatagggagatgattttggatgatttatatgggtttgttgttattataagagtttttaaaagtgtaatagattatttgaggggtgtagtgggagaggtttggaaggaggaaggaggttataagttaagaaatgtaggtgaatagaaaatgtaggaaaatgtagttttttttgtagttttgggagggtgtgtagttttgtggatattttttttgtagtttagtgaggtggagtgtgggattaatttgtgttgtttgatattataagtgtgtggttatttgttatagtagtgatgggaattgaatgttattaggtagtagtgtttttattttggaagaattaggataaatttttttgtggattttaagttttgggagattttgggtttttttggattgttttagttttgtaattataggaaaggttttttatgtttgtttgggagaagaaaattttgtagtaaatttatttttttttttgataaatgaaggtgagggtgtgggttggatatatgttttttttttgtggattttttttgttttaatatttagaattttgtagttgaaggagattttggggggttgtttgtttgatttgtaagtgaagaaatggaggtttagggaagttaagtgattggtttagggttatgtagagttatgttggaatattaagttagatagtttagtttttgttttaaagtgtttttttttttggttggggaggagggttggagggagtggattttgagtaatagtagtattggtaggggttggaagagtagttattgtatttaggtgttggagtttttggttattttttgtaggaattaggtgatttattatggtataggtttttttttgtttatttgtagttttgggggttttagggattagaggatattttggtttgagggttggggtttgagagaagagatggaagtatttttagtttggtttgtttttgtggtgttttgtaggtatatttggtagtttaggggttttagagaatttggttggtgggtgtttttattttgttgtagttgtattttgtggttagtagtttgtaggatttgggttgttgtttgtggttttgaaatagttattttttgagttgagtggggattaggtgagtagatttttatattttaattgttgtgatttttttgttttggaggttggtgggtagtttggttggtgttttatggtattttatgattggttttgttattaggtttgtgagttgtttttttttttttgggtattttgaatggtttttttgagagttttgttttgggtttttgtttttgtaggtttttgttgtttggggtgttttttttttttggaagttgggtttttttggggatttattaagaagggttttgttgagtgttgttaaattgttttatttggtttttatttgttttatttattattttattttaatttttatgttttttttttggttttaagatttgagtaggtagggtttgtgaggtattttaggttttttgatgttgttagtatttaggggattgttagtatatatgtagggagggaaggaatgaaggaagagatgatttggggagttttttagtttttatttgtaattggtatattgtgataaaatatttatggtattttattttttttatatattttttttttaaatttatttttatttgagatggagttttgttttgttatttaggttggagtgtagtagtataattttggtttattgtaatttttattttttgggtttaagtgagttttttgttttagttttttaagtagttgggattataggtgtttattattatgtttggtgaatttttgtatttttagtagagatggggttttattaagttggttaggttggttttgaatttttgattttaggtgatttgtttgtttttgttttttaaagtgttgggattataggtgtgagttattgtatttggtttttgtatatttataaaagagaatttgtttagaaaattttttagatgtatttttagggttttaaggtatagatatatgaagtttgttagtgagtagttgttgtttattttttttttttttttaatttagagtggtttgtgttttaagtggatagttgtttttttttttttggttttttgttgtttatgtttttatagaagtagggagaagaggtaggaaggtgatgtgtgattatttgttgggtgtttgtatagtgttgtttgtataggtgttattttttttatttgttattttttttgttgagtttttttttttttttgtagatgagagagtattgttttttagaggttaagaaatgggtttagagttatttagttgattagtgtgtagttagatttgaattatattttgttgatttttatgtttgtaggtttggtttgatgagatggatagttgggtggtggagattttgagattttggatggtttttaaatagggtttgtagtttttggatagggagagtttggtataaagggtttgtggagtgagttgggggagaaggtggtttagggtttttgtttttgaataaatagatggaggggttattttagtgtttttttagtttttggtgtgttgggtttttggttttgggaggagagaatggagttggtttttattttgggttgggttggtttgggtttaatttagataagttttttagtttgttatgagtgatatttttgtttgttttggtgtttttgttaaaaatatgaagggttttagaatttttattttggtttgttttttttttagatttggagtgggtttggggttgataatagttttatgttagatagtttgagtagttattagtgttattaggtttgatattgtggtttttgttttggagggaaaaataaggttttttttgggggattttttgttagtttgtgaaaataggtttggagttagttagtgtttttatgtttagatattttgtgtggtttttaaagtgtttttatgttgttagtttatatgattttttttaaaattttataagggagggtaggaagtttgagtaatagtttgttaagtatttatatagtaggtggttttattgttttttatttatagataagtaaattgagttttagggtggttattgtttgttttttaagttatttagttatttagttatggaagaggttatgattttttatattttagtgaagttgaagatttttttttttgtttttaaaaatgtttattttttagggtagtgaatatttggtgtttttgtttagtgtaagaggtgaatgtttgttatttttgtttttttttttttattagatttgattttttttttgtgatgggaatattttgtaggtagtttgttttgtttttatagattttgagaaatggggtttaaattgttggttgtgggtgggataggtgatattgtagtgaagaggtggagtatttttgtagtggggaagaaatatattttttttatttttttaggtttagtgtttgggggtttgtgaattaaatttatttaagataaattaatgagagaaaagatagatttaattatatatgtatgggattttattgaaaaatgtgatttaaaagagtaggtagaaggtggggtttgtgattggtttgaaggtagtgagttattttagttgattgtttatagttagttatagattagattttttgttttattgttttttttttttttatttgttttgttttttttgagttagagttttgtattgttgtttgggttggagtgtaatggtatgattttggtttattttaatttttgttttttgggtttaagtgatttttttgttttagttttttgagtagttaggattataggtatttattattatgtttggttaattttttgtatttttagtagagatagggttttattatgttggttaggttggttttaaatttttgattttgtgatttgtttattttggttttttaaagtggtgggattataggtatgagttattgtatttagttaattagttttaaaaaaaaaaaaaaaaaaaaaagaatttagggtttgtatattattttaataggaaaaaaggaaggggtgaaagtatatattatgggttgggtgtgatggtttatgtttgtaattttggtattttgggaggttgaggtaggtggattatttgaggttgggaatttaagattagtttggttaatatggtgaaattttgtttttattaaaaatataaaaattagttgggtatggtggtgtatatttgtaattttagttatttgggaagttgaggtaggagaattgtttgaatttatgaggtggaggttgtagtgagttgagattatattattgtattttagtttgggtaatagagtgagattgtgttttaaaaaaataaataaaaaaaaaaaagtatatattatggtaaaataaatgagtttttggaaagataaataggtttttaggagttgagatgggagatgtgaagttttgtgataatgtttttttaggtgtggtgtggaaattatttatattttttagggaagagttagttgtttttagggagtagatttgggtttgtatattattttaataggggaaatggaaggggtaaaagtatatattatgggttgggtgtaatgtgtttagtgtaggaggtagatgtggtttatggttgttgttgaaattagtgtagggtttgattgttttgtattgagtgttgaggattttggttttgtattagttatgagtttgtagttttgggatatatttgatgttggtttaaggggaaatgaggttggaggggtagggtggttggattggatgtgggtttggggttattgttgatttataaagtggttattatatgggaataatagagttggttatagattataattagtaatattatttaaaagtaaggttatatttttaataataagttatattttaagttattattaatttataaaatatattgttggtataatgatagttttttaagaaggatataaaaaggtatgttgggttgggtgtagtgatttatgtttataattttagtattttgagaggttgaggttggtggattattttaagttaggagtttgagattagtttggttaatatggtgaaattttgtttttgttaaaaatataaaaaaaaattagtttggtgtggtggtgtatgtttgtaattttagttatgggggaggttgtggtagaagaattatttaaaatttgggaggtggaggttgtagtgagttgagattgtgttattatattttagtttgggtaatagagttagattttgttttaaaaaaaaagaaaaaaaagaaaaaaagtaaaaaggtatgttgaaggtatttgtttgtggaaagttgtaatttgatgggaggtagggtgagtattttttagaaaggtggaaatgggtttttttgttatagagatttataaatatagattgaggtttgtagtttaggagatttaaaagaggtaaaggtgaataagagttaaggtttttaagttagggtttgattttgggggtgggggttatatatgatggaggatgttaggagggttttttggaggtggtgatatttattaggggggattttaggtggggtttgtgagatagtaggatttggttgaagagtgtaggttttttagataggagtgggaatttaggtttgaaaatgagttggttagattgtaggggtttttgaatgtaagggaagaattttaattttaatagaggagtttgggaagttgtttgggaaaaggagtgataaagtgggaggggttttttagtagagttttgtatgggtaggagggagtgagatgggaggtgggtgttggtaagggatgattttagtggtttaggggagtagttatagggtggaaattaattttgtggggtttgggtaggaagggattgatttgagatattgggaagaaatagttagtaggattttggtgagagggttgggggttggggaggggggtgtggagagtgggagtttgagtttttgaaaatagatagtgttttaagggggagatttgaggtaagatgtggagaggtagttgagttgggaagttggaatggaggtgtggttattttaggagattaagttagggggtgaggggatttttgggagttatttagattttagtattagggaatatggaggggagaaggaggggagaagaattagttggtgtgtgttaggtattgtttttgaggttagatggggtggggttggatattggttatgaggatttttttaagagttgggttaatagtgagatgggtggatattagatggtttgggttaagaagtaagtgggtggtgggaagttagaagttgtggtgtagatttattttgagaggttgggttgtttagatagggagaaagtttatagtttgaggaggtagataggttaaaggaagagggtttgtttgtttttgagattggggtattttgaatgtttttttaggttaagtgagaagaaattagaagaggaatatgttatttaaatgtgttgaaatagtttagtagttgtgttgttttatagaaaatgtgtagaggtttttttgttttattatgtttgtttggggatggtttttatttgggttatttagggtttttttagtttgttaatttaagggtggtaggagttgtgggtgtttttagtttttttttaaggttggtttgtgggtagaaatgtgggttgttttggggtgttatagttataaatgtatattagtttttagaattatatttttgttttttagtttttttttttgtatttttatgtagaagtgtggttgttagtttataaaggatagggagggatattgtttttggtatttgatgggaagtatttgttgtattttattggggtgttgtttaggatggattggaaaagagttggtaggaaggttgagttttgtgtttataatttggtttggtggtggttgaggagtttggtaggagtagagtgtaggatttgggaattgggggttggtgtatgtgtgtatgtatgtgtgtgtgtgtgtgtgtgtgtgttgggtgggtagggaggaagttgtgaaattatatttttttttttttgttgttgtgttgttgtgtgttttagtagtatgtgggtgttattatattttttagtaggtgttaatttttaagattgttttgggttttttttttagttggttgagttggaggtgggagttttaattgttttttgtggtttttagagtgggattttgttgtgggataggttggttaatggtgtttttttttttgtgatttttttgttgggtgggttatgaggaaggattgtgggtgttgtttatagataggtggatatgtggtaaggatattttgggattttttttttgatgttttttgaagggggtatttttttagttttgagatgagtttttgtggatgtgggaagtttattattttaagagtagtagttttggaaaatttaatatagaattttgagtaggggtgggaaggggttttgttttgtttattggttgtttggtagagttttgtataaggaagtgtttgtgttgttgtgggtggaggaatggattgagggttatatttgttttttgttgttgttgtaattgtttattataaatttagtggtttaaagtaatagaggtttttttttttatagtgttaagggttagaagttgattagttttattggattaaagttaaggtgttggtagaatttatttttgttttttttagttttgggtgggaggttttgttggagttttttggtttgtggttgtatttttttagtttttgtttttatttttttatagttttttttttttttgtagttagatttttttttgttttttttttttttttttttgagatggagttatttaggttggagtgtagtggtataattttggtttattgtagtttttgttttttgggtttaagtgatttttttgttttagttttttgagtagttgggattataggtatgtgttattatatttggttaatttttgtatttttagtagagatagggttttgttatgttggttaggttggttttgaatttttgattttaggtgatttgtttgttttagttttttaaagtgttgggattgtagttatgagttattatatttggtttgttttttttttaaaggatgtttgtgatttggggtttatttgggtaatttttttattttaatatttttagttatatttatagagtttttgttgttatatgaggtaatatagtttgggaagggagagttatttagtttattttaggggtttgtggtgtattttagggtttttttgattttaagatataaagtaagaaaataaattggtttaaggggaaaaaaggatatgttgaattttgttgttttaaatgtatatttttttattgtgttaaaatgtatagaatataaaatttgttattagtaatattgagtatatttatagtgttgtgtaattattagtattgtttagtgttagaatttttttattattttaaagggaaattttgtatttatgaaggatttattttttatttgttttttttagtttttggtagttattagaatgttttttgtttttataaatttatttttaataagtgtaattttgtgtgattttaaaataaataaatatgagtatgatgagttgtttattggaaggatatttatgtggggaggttggtgtgtggagtgtgtaggtttttggatgggtaggagttgaaggggtgtggatgtgttgtttttttttttttttgttttttttttggggttattgtttgagtatttttttttgtaaatggttttaaataatgttttagtttttatgtttgtattgttttttagttttaggattttttattaaaaaatattttaagttttagatttatttttgggaaaattttaatggttttatttttttttttgagttagttagattttatggtttgtggtgggttgtttttgagttttgagtatttgtgagttagggaagtaggataggtatatttagggaaggggaagagttgttgttagttatagtaattgatatttttggaattgtttaagagatatttagtgtgtgtttaaaatatttatttttttttttgtttgttttttgagatgaagttttgttttgttgtttaggttggagtgtagtggtgtgattttagtttattgtaattttttttttttgggtttaagtgatttttttgttttaattttttgagtggttgggattataggtatatattattatgtttggtgaatttttgtatttttagtagtgattgggttttattatgttggttaggttggttttgaatttttgattttaggtaatgtgtttgttttggttttttaaagtgttgggatgataggtgtgagttaatatatttggttatatttattttttaggagaagttttgtattttttgaaagtgaaatgtttttaggtgggtgatattgatggtgggatttgtggttttattagtgttttatgagagatgttgttgtgtgttttattaagttgtattttattgttttttaaatgtggtttgtagatatggtgttgagaatgatttgggaggtttaaattataatatggtttaaattaatagttttttgatgatttggtattattttaggattaaattgagattatttgaggatgggtgtggtggtttatgtgtgtaattttagtattttaggaggttgaggtgggtggattaattgaggtttgtagtttgagattagtttggttaatatggtgaaattttatttttattaaaaatataaaaagtagttgttggatatggtggtgtatgtttgtagttttagttatttgggaggttgaggtgggagaattgtttgaatttaggagatggaggttgtagtgagttaagattatgttattgtgttttagtttgggtgatagagtaagattttgttttttggtaattaaaaaaaaaaaaaaaaattgagattttttgagttgtattgtttagtatgatagttattggttgtatggggttatttgaatatttgaaatgtggtgattttaagtggagaggtgttgtgtgtgtgaagtgtattttgggttttagagttttagtaagggggaaagaaaagaatattaaatatttgttatttttatattgattatatgttgaattgataatattttgggttttgttaagtgaatgatattaaaattaatattatttgtttttatattttttaatgattttttttttttttttttttttttttttttttaaatatggggttttatattgttgtttaggttggagtgtagtggtatgattttggtttattgtaatttttgttttttaggtttgagtgatttttttgttttagttttttaagtagttgggattataggtggttgttattatgtttggttaatttttgtatttttagtagagatagggttttgttatgttggttaggttggttttgaatttttgattttaggtgatttgtttattttagttttttaaagtgttggtatgataggtgtgagttattgtgtttggtttgtttttatattttttattgtaggtgttggaaaatgtaaggttgtgtttgtggtttatgtgttgtttttgttggagggttggattgagggttagttgagaaggttttggggttgttttatttgaatgttgagtgtgtgttgagtggtagagaattttgagaagtgttgaaggatagaggttttgtgtgggggatgtagttttaggttggagatgttttttttgtgttttggagatttttatttggtgatagtaagaggaattattgtaagaggggtggttattttagtaaagtatttaggatgttggttttttagtttaggaatttagaggtagaggaggggaggaggttgggtttggaggagagtagggttttgggttttgggaaaagtttggggggttagaaagttgggggatagattgaggttagaggtaaagagaagaaggtttggagaggagggttaaggaagaagggttttgtttatggggagggagaggtttatggggtaggggtgtggtgggagttgtatttttgaggttttttgttgattttgatatttggttagaaaggagttttttttggtattttttgttagtggtttttggagttgttttttaggggttagtgatgagggtgttttgggttgggttgtagatagtggaaaagataggttttttttatttttagtgttggggaaattagttttttggaggaagggggagttgtattttttgagtggttgtattttttggtttagatgtgtgtgttttgttgtaattttggtgattggtgttggtggtgtttattttatggatggggaaggttaaattttatagatattgagtgataggtttagggttttggattttagtgtttgatttagaatttaggtttttgatttgttattagttttttttttatttagatgggaatagggattttgggtatgtagtttttttttagatatttttttggttttggtttggtgtttggagattagtagtagtagttttttatggttgtttattgtgagggtggggagggttgtgggattaggaggttttagggggaaagttggttatgaggagtgggaagtgatgggttagatgttagtgattgttggttggggagttgttggatgtggttggtttgtttggttagtgtggtgggtgttttggggttttagttatttttagttatgtgtgggggtgtgggatgggaaaggtaagagtgtgtggagtttagttagtatttaatatgaggttttgtgggggttgtttgagggtgtagtttttagaatttagtttttggtttttagaaggtgttattaaaggtttttttttatttgagtgaattttttttagtttttagtaagtttttggaatgagtttatttttaggtgtttttttttagtgtgggagtggttatgtttttgttgggagtgatttatttgggtttagaggttgtggtattgagatgggtttggtagattttagtgtttaggtttagtttttatagtgttagtttttttttttggggatttttttgtttgtgtttttttgggttttagtatattttaggtttgtagggagggggagaggaagagattgatttattggttaggttttttaggggttggagaggttggagaggtaggagttggattagatttgaatttagaggtttttggaggaagagtttagggtgagttgtgtttttattttttgtttttttttttttgtttttttttttttttatggttttagttagtaagtatttggggtagaggggataaatttaggtggttgtgttttagttttggttgtaggtttgaatggttttttggggtggttggttatgttttttgagagtttagttgtggtgatgtttgagtaggtaggtgggggagtatttaggaagtaggggtgttaggtagagtataaggagagagggtgtttaggttagttttaggatttggttgagaggagggggttttttatgggtattgtttttggtaagtatagggataagggtaaggatggtatggttagaggtttttgggagttttttttttttttttttttttagtagtttttttttattttttttagggattttgttatttttttttagtgtgtggtagttttttggtgttttttttgtgtttttaggttgtttttgtgttgggtttgttgttgggtgtttttatttttgtttgttttttttttttgttttttttgttttgtttttttggagtaattttttattgagtttttttttttaggtagttgaggtttttttttatttttgttttgtgttttgggaggttttttgttttgtgattataaagtttttttgattttttgtttggttttgagttatgtgatttggtgggtgggttgtggtttttggtgtgtttagtgtagtttgatgttttgttgttggggtgagttttgtttttttgttttttttagttttgtattattggtttgggggtttttaggtggtgtggttgtgaggtggattttgatggttatggtggtggtgttgggagttatgttgtttttgggttttggtttgaggttggtaggattgagtggggtttttaggagaggggtggtggggagtttgatttttatgtggggattagatttttggttttaaaatagaagaatagggttttgtgtggttatagttatttttttgtaaatatttggttaattaagttgagtggttaagtttttttgttgtttggagttttttggaatatgttttttttttgtaaggggtttttttggtttttaggagggttaggaagaaatttgaattggttattgttttttttaaaattattttgtttaagttattatttttttgggtttttgaagattggttggttggaggttggagatagttttaatgtttgaaatgttgtaattgaagttttttgtggtgttggtattgggatttagggagttgttgttatagtgtagttttggatttttggatgtgttggatatgtgtagggtgtttttgggaggagtggggagggagggtgttgttggtggggttggtttgtgtgtgttttgtttttttataatggtatgttgtgtgttggttatgtagaggtatgttagtgagtaggggttgagggatttttttaatggatttgtttttagagggtttttttatgttgggagaattttagagattaaattatgtagttaatggggtggtttttggttttaaagtagggaggggtgaggagttttgtaggtaatgttatttgtttttgaaatgttgttttagtgattttggggattgatttagtttttagtttgttgtattttatttttggtttttttttttttgtttttttatgtgaaatttgttgtgttttggttagaggtttggggaatagttttttgtttatttaagataagtttgtaattttttttttggagaaaaatatgttatttggaagtaggttgagtagtggttttttggtaggtttgtttggggttgtggagatagtatttgttggattaggatggagttggaatttggtttggattttatatgagaaaatttgttggaagaggaggaagtagaaaaaggttttattttttaataatgttgtgggttttttttttttatttattgttattttgttttgaaatttaatggggttatgtgtgtttttatgaatgttattttttttggttaatttttttggtagttttaggagtttttttttaggaaaaggaagaaggtgtttgtttagtatttagtatatgagtttttgttggaaaggtgggatttttgtttttttttgggttttttttaggttgagatgtggttaaggaaggtttgtggtgtggtttgttttttttaatgtttgtttttggagatttgagttgttgttgatttttagtttgttttttttgttttttggttatttttgtgttggggtggttgagatattattgtattggttattttgtgtttttattagtttttgtttttgtaggttgttattgtgatggtgatggggttaatttagttgtggtggggaggatttattgtgtgtgtttggggggtggtgtggggtattttgggatgagaagatgtgatttttgttttgagagttttgttttaatggaaggtgggggtatagttgtaggtagaagttattaagtattgtggttagattagtattttatgttaaaaatggttttgttggttgggtgtagtggtttatgtttgtaattttaatattttaggaggttaaggtaggtagattatttgaggttaagagtttgagattagtttggttaatatggtgaaattttgtttttattaaaaatattggttaatttgggtatggtggtgtgtgtttgtaatggtagttatttgggaggttgagataggagaattatttgaatttgggaggtggaggttgtagtgagttgagattgtgttattgtattttagtttgggtaataagagtgaaattttgttttaaaaaaaaaaaaaaaaagttttatttgggtttgggatttgttttttgaatattgggtttattgtgttttataaggatttttattttggaagttttagatttatttgggtaattagagtttttgggttgattattttttagttttggttagttttttgggttattgtatttttttaattttttgttgtgttatggttggtttaagttgtttttattagataatgtgaggtatttttataggaggggataattttgtttttaggagttttttttttttgtttttaggtttggtgtagtgtgtggtttttttgttggtgttaaaggttttaaggtttttttaagaagtttgttattattattagtagtttttgttatttggtttttttgtatatgtaagttttttttatatattttggatgtttagggtttttgttttttttttttggttgggagtgtgggaagagggttttattttaatgtttgagagtagggttaatggttagggtaagttgtgggggtttttttttgttggtttttttttgtagtttttattttaatatagagtattgatattatttgggttttgggaagatttggaggttgattattttggaggtttttagtgttttatagttattttttggggaagaggttttttgagggatttgtggtttttggttgggattttagttttagagttttgttttttggtgttgagttttgatttgtttattgagtgttagtttggtttttggataggtagggatttgtttttggagtttagtagagttttgggaagtttttttaggagggtttttgagggtggtggttatgtttagtttgttgtatgtgtgagtttgtttgatgaggaattggttgggaaggtgtgggtttaattataggtttatgagggttttttttgtttttatttaggaagtagtggagattttggtatatttagtatttgggtttgtgtttgtttagttgttggtggaattatgggagttttgttttggggtttgtagagtagtagtgggaattttttttattttagttttttttagagttggttgtttaaatttgttgttgtttagtttttttttttttttttttattaattttgggaattgtatattgtttattttattgggttttggagtgggtgtaggaagagagagtttaatatttagaggtttgggttttttgtaggtgtttgagttgttgtggtttgagttgggttttttgttggaattattatagtagatttaatgatttgtttgtaggagttgttttattttagttgattttggggttgtgggaaggggttgggttttggttttgttgggggtggggggttagtgtaaagggtttgaaaagtggtagaggtgatggtttatttgttttttttttggttggttggtttaaatgtgattggttttttttttttttttttttttttttttttttttttataaataatattaaatgtgatttgttaatgtatttatttgggtttagtagttggattatgggtagaagtattttagatttgttattttttttaagttaagggtggggaatattttttgtgagattttggtttttgagtgtttaagattgtttttggaattttaattttgggttggttttaggggattgatgttgatggagttgttgatattgatttttggtttttgtatggtttttaggaagggggttttttgttttttgttttgttgagtttggttggtagtattttttttttaggtttgtgtttttggtagggtttgttgtttttgttttgttttgtgggtgttaggttttaagtattaggtgatttggttattgaatggttattgaatagttatttttgttggtgtttttagtggaatgtgtatggatgtttttttttttttagatttttgttttttattttttagtttttgttttaggggttattataggattaggaggtatgtagatgtgggtggtatatttattgggtagatttagttttgaatttgtatgttttttttaagggggtttttagtgggtggggttgatggtgttgtttttttttttgttattagaatggatatgaggattgtgttttgttgatttatgttttgagtttttagatgttataggtgtttgtttaatgagtgtttgaatgaatggttagtattgtgtgattgtagatttttaatttttatttaaatagtttgtggtttttgtgaggttattttgagatagttttataagaatttttattttttttgtatgttttgtataaggtttttttggggggttttttagaaaaagggttaaagagtagtatttttttggggatttgaatatgattttttttggggtaggggattgttttggaagatttttggtattgttttttatgtgttatgtgattaggagggttttggggtaggatggtgttttttgtgttttgtgtgttggggttggaggaaatattgtttgtggttggtgttatttgttagttttgaagattaatgatgggttggatagtggttttattgagtgggagggagaattgttgttgtttgtagttggggggttgggtgggtgggagttgaggttagggagaatagtgtagatttggtatggagaggtttggaggaggagtagggggttttagttatttagggtgtagggatgttatatgaggagtaggtgtggtgtgtgtttttttgtgggttttttattttttggttttgttatttgtattaggttttgtggtgagagggtatagagtggaggaaggtgttgtggttagggtaggttatatgttgtgttaatggattgttgttatttgttgtttttgtggttttgttgttaggattttttagtattaggtttttattattaggtatgggttttataggtattattggttttttgaagttagggatagattttatagataatattgagtttttgtagttagggatgggtttttatggttagtattagattttagggattagtattgggtatttatagttagggataggtttttatggttagtattaggttttagggattagtattgggtatttatagttagggatgggtttttatggttagtattagattttagggattagtattgggtatttatagttagggatgggtttttatggttagtattaggttttagggattagtgttgggtttttatagttaaggataagtttttatggttaatattagattttagtgattagtattagatgtttatagttagagatgggtttttatggttagtattaggttttagggattagtgttgggattttggatgattgaaggagggtatggttgattaaagttgtaggagttagtttggttattttgaggtattaagttattattgtggttttaggggatttagatttttttatttgtttttttgaattttggaattagatatatttgggtttagtttttgtttttggggttgtgtgtttgggatggttgttttatttttttgaagtttagtgagatggggatggttgtatagggtttggtatagatggtatttgatggtatagggttatttgtttgtatttatatagttttggtttttgttttggttgtgtattgagagttttatgtttagatttttgttgagtttttaagtttttggttatgttttaggttttttgtgagaagtattattgtatggattatgttttgggattttattttgggttgggaagtttgttttatttttttaagttttttttagaggtgttttatgttttattatttttattgtttgaggggttagataggggaatttagtgtgggaggtttagaggtgttggagtagatgttaagtgagttttgtgtttatgtgttgggttttggtagatattttgaatgagttttttttttaggaaggagattggggttttagtttaagttgtggttttaaattttgtgattaagagtggagaaaaggtaagatttttttttttagttttttagaatagttgatagtggtggaaatatggggtttatattgaatttttttgtaatttgttgaagagaatttagtttatatttttaggggtggaggtttggttgatttggtagtgtgtttgtttttttggttatagtttattttggattgggtattttggtgtttttttttagtgatgtagtgaagttattatgatgtgtttagttggtgagaaagtgttttttgtaatgttttattttttttagagggtgaataagttttgtttattataaataattatttatagaatatatgaggtttaatttaattttgggttatggtagtgttttttgggtaaatttatgtgttattttagttagagtttgtgtttttataggttttttggatttattttgaaggggggttggattttttgtttgttttgatgagagggttgtaggatagtttttagtgagtttttttgagggttgtaatttttttttttggtatttttttgtttgttaggaatgttttaagtttttagtagaagtttatttattatagttgttttttattttgtttattattttttttgtttttatttatttagtagattttgtgtatagtttagtgtaggatttagggtgggaaggtgttttgggtgggttggagtaaggtttttagttagggtggggttttaaggtgggtttatagttaggattgtgatttgggaggtttttttttgttttgttttagttttggtattgttgttgtttttgtgtttagtggagatttattggttttaggttttaaaattttagtgaggtttgtagatagggaggagttttatttgagggtagagtgattgttgggtttatttgtttgttatgaattatgtggttttagatttgttatttttttttttttagagttatggttttttgtttgaaaaatggataatgatggttattatgttagggattattttgaggataaatggggatgaaattgaagaggtttagtatggaatttggatatagaagtgttaattgtgtgttattagttgtggtggttgttaaggtttaattatatggtagttatgggttgagtggtgggtgggaagtggggagtaggagtatgtaagatgggtatttttgaagtttttgatttagtgagataagtatatatttagttttaagatggagtgttttaggaaggtggagattgtaaaggttttgtggtgtaggagtgtgagttgtatttttgggttttttagaattttattagagtttagggaggaggttagtttagatataggggtaatgggagagatgggagtgagaaaatggtttggtgtttggaagtggagtttggaaaggtgggtgtggggatagaggagggttttgggggttatgggtttatgtgtttaggaggtggaggtagtgaatggggttatggttggttttatatgtggtattattagttttgttgagtttgtatttgttttttaggttttttgagtgttattattatttggtattttttggtttgatttttgttttttgtttgtttgggaagagtgagattatttgtttaaagttttttagttgtttttaattattttggttgttttttggttttgtttagggttagttgttgatttgaattgtttggtgttatttttttagatttttggggttttgttttggtattaatagttatttttatttttattatttatttgtatatttatttagtagtgttttttgggtatttatttagtaatattaaggtgttgagatgtggttgtggttaagatttgggtttggtttgtgaggattttgtagttgttatttttttagagtatagttttagttaggtatattgtggggtttagaaagagaaattaatatattgtgtttgtttattttgagttgttataaggaatagttgaggttggggggttatttgatttatggttttgtaggttgtataagtggtgttagtatttgtttggtttttggggaggttttaggaagtttttttttatggtagaaggtgaagggggagttggtatgttatatggtgagagagagaatttttagattttttttttttttgaaatggagttttgttgtgttagttaggttggagtgtagtggtataatttttggtttattgtaattttagttttttgagtagttgggattataggtgtatgttattgtgtttggttaatttttttgtatttttattagagatggggttttattatgttggttgggttggttttaaatttttaattttgtgatttatttattttggttttttaaagtgttgggattataggtgtgagttattttatttagtttttttagattttatagtaattagattttttggattttgtgattgtggggagggtattaaattatttatgagggatttatttttatgatttaagttttattttttttaggttttatttttaatattagggattatattttagtatgagatttggaggggataatgtttaaattatattatatgtgatttttttgtgtgtgtgttagtttttatatttggttaagtagtagaagttttttttttgttttttgttgagagagtggtgggggagaaatgatttagggatgggaggttggttttttgaggggttttggtgtttgtggagtgggagtgtgggaaggtttttatgttgtgtgtgttgtgttgggttggttttttatagtttattgtggtgttttttgaggattgttggggaggaaagagttaattaatttggggatttagttgttgaagttattattaaatttgagtagtttaggggtttttttttttttgggttttatgttatttagtatagtggggtttaattgaatttttttttattttttaaggtttttggttggtgtggttggggtttgggatatggggagtgagagggtttgggttttttttagatttggagtgggtttattagaaatggtttaggaaattgtgggggttatttttagtagttgggggtttttgtggttatttttttttggttttgttgagtagttttggtttttggagtttttagtaagggatgtgggggtttgttaggttagggtttttattgttgttgttatgtatagttgtattttgtatttggggagtggggtgttgagtggggtgtttgggaggtaggtttttttttgttttttttgtttagagattttggggatgagttgagtgagatttttttggtttttgattggttgtgtttttgttgttattttttattttttttaagtggaggtttatgatttttttttttatttaaaagggttatttagtgatttagtagattttagtttgtgttatttagggtttttttaaaaatttgtggggaggttgggtttggtggtttatatttttaattttagtattttgggaggttgaggtgggtggattatttgaagttaggagtttgagattagtttggttaatatggagaaattttatttttagtaaaaatataaaaaattggttgggtgtggtggtatgtgtttgtaattttagttatttgggaggttgaggtaggagaattatttaaatttaggaggtggaggttgtagtgagttgagattatattattgtattttagtttggatgatagagtgagattttgttttaaaaaaataaaaataaataaataaaaataaaaatttatggggggatttttgtgtttattggttggtgtgaggagagggtgaggagttgtagagaaggtattaggttgaggattgtttttatttttgggttatagaattgaaggaggggatatatgaaagatgtttttagatttgggttggaggttggggatatttgagggtaaggatgatgttgtttttgtttttgtttgtagaggagtgtatagggtttattagttttttgttgttgtttaagtgatagttttatggagatagaatttatatattgtgatgttgatttttttaaaatttatagtttaatggttttgttgtatttataaagtgattgtattagggttatttagagaaatagaattaatagaaggtgtgtatgtgtgtttagataaagagatttattattatgaggagttggtttattttattatagaggttggtaagtgttaagattggtagagtaaattagtaggttggagatatgggagagtttatgttgtggttttggtgtttatttgaaggtttaagatttaggagagttaatggtgttgttttagttttgagatttaggaaaagtgtatgtgttagtttgagtttgaagtaggaaaaatttgatgttttaggttgaaggtggttaagtgggaagaatttttttttatttaggttttgtgtttttttatttagatttttaggtttttgttataaaattataaagatttgattagaataaaatttgagaaaaaattttttttttttattggttttggatttattggttgggattttggaaattagattgatagagattaataggaaataagtataataatttaagtaagttttatttgatattgagtttttataaggaaatgaagatttagagaaattgttagtttgagtggtttttgttttgttttgagataaagttttattttgttgtatgtttaggttggagagtagtggtttgattatggtttattgtagttttgattttttgggtttaagttggggtttagttgttggttttgggagttgttttgaatttatttttaagttttagtttagatttttaagtagttgggattataggtatgtgttattttgtttggttaattttttattttttgtagagatagggttttattatgttgtttgggttggttttaaatttttgggtttgagtaatttttttgttttggttttttaaagtgttggggttataggtgtgagttattgtgtttggtttaggtttgaatagtttttatttgttttgtttgttttttaaatttgtttgttgtttgttttgagtagtttttttgtttattttttttgtttgttttttgtttaggttggagtgtagtggtatgatttttgtttattgtaatttttgttttttgggtttaagttatttttatgttttagttttttaagtagttgtgattataggtgtgtgttattatatttggttgatttttgtatttttagtagggatggggttttattatgttggttaggttgttttttaatttttgattttaagtgatttggttattttggttttttaaagtgttgggattgtaggtgtgagttgttgtgtttagtttaggtttgagtgtttttatgttgggtttgatgaagagtggaaagttgtgggaaattgtgatagagtaataaaagatgagttgaatagtgagtttgtgggggttttggtaagatttgtgtattggggttttttttagattttttgtttttggagatgaggttgtttttttttgttgggtgtagggagggtattttttatgtgaggggtttatgatttattttagagaaggggtaggttagtgagttttttttggatttgttattttttaaatttttttagttgaaaatatttattatgttaaggtattgtattttggagtgtgtgttttaagttttgttgtttttaattgattgggtgaggtttatttttattagagtatatagtttgttttatttaggtttttgattgtattttttttttgtttgttttgagaatatttattagtagtgtttgtggttgtagtgtttattttaagataaatttgttgggaagtattttgtttttattattatttttatattattttagtatattgattttggaaataaaagatattattttgtttatagtattttatttttagtagtggtattttttttaaaaaaaaatggtaatttttagttgggtgtggtggtttatgtttgtaattttagtatttgggaaagttgaggtaggttgattatttgaggttaggagttggagattagtttggttaatatggtgaaattttatttttattaaaaatataaaaattagttaggtgtggtggtaggtatttgtaattttagttatttgggaggttgaggttggagaattgtttgaatttgggaggtagaggttgtagtgagttgagattgtgttattgtattttagtttggatgatagagtaagattttattttaaaaaataaataaataaataaaatttaaaaaaaaatagtaatttttgattgttgaaaatgttaaattttagagaatatagtatttttataagtgatgttaatattgtttttgattagttgttggttgaagatttatttgatgaatttgatttttttagaatagatgatttagatgattttgttgttttgtttagaaataattgtaggaataatttaaaaaattttttttttttttaatttttttgttttttgagatggattttttttgttgtttaggttggagtgtagtggtatgattttggtttattgtaatttttgttttttgggtttaagtgattttttagttttagttttttgagtttagttgggattataaggtgtttgttattatatgtggttaattttttgtatttttagtagagatggtgttttattaggttgattaggttagttttgaatttttgattttaaataattggtttatgttggttttttaaagtgttgggattataggtgtgagttattatgtttggttagtttttatatttaatttttatatagagtatttagttagatttgttttagttttaaagagtgtgtttatgtaaaattaagtgagtgttggtagtgagttgaattttttaaaaggtaaaagggttaaatattaaatttatttaaaaatatttttatagatatatttagaataatgtttgattggttatttaggtgttttatagtttagtttagttgatatagaaatttttttttttttttttgagatggagttttgttttgttgtttaggttggagtgtagtggtgtgattttggtttattgtaagttttgttttttaggtttatgttatttttttgttttagttttttgagtagttgggattataggtgtttattattatatttggttaatttttttttttgtatttttagtagagatggggttttattgtggttttaattttttgattttgtgatttatttgttttagttttttaaagtgttgggattataggtatgagttattgtgtttggttgatataggaaattaattattatagttatatagttattgttattaattttagtatattttattatttttaaaagagattttgtttttattagttaatttttatttttaattttgggtttttagtttttagttattgtttatttgtttttgtttttatgaatttatttgttttagatagtttgtataagtggaattgtatagtatgtggttttggtgtttggttttttttatttggtagaatatttttaaggtttatttatattgtagtaggtgttggtgttttatttttttttatggttgaataatattttattgtggatagattatattgtgtatttttttatttgttgatggatatttgggttgtttttgttttttggtataattttgttgtgaagaattttgtagtgagtgttggtttataggtttttgtgtgaatatgtttttattttttttgggtaattgtaagattatgtggtttagttaattagtttttaagttatgtgtttgttgagggatttaggtttggtgggggtgtattgttgtgtttggttagttaggtgttgtgagtttgtgttgtagttatttttttgtgttgtgttttgaggttgttttgttggtattgggtattgtgagttttaggaggttaaagttttttttgttttattttgagtttaggttttgttttatgaattaggatgaatggatattgaattaatgtagggatgggtggggttggggtggggatgtagagtgattttgggggtttgtagttgggttttggttgttgatttttagttttttttgtttgttggagtttagaataagttagaaaggggaaatgtaaagtttgagtgttttttttgtggtagattggtaggtttgggtgggtgagttatttgtagttagttgtagtgtgagagaggaagtgggaggggagggagagggtgagtttggtgtaatttatttttggaaggaggttgggttgaggttgggggaagtgatttttatttttttgagaggatttttttttggggttaattttaaattaagggagataagatttttttgggggaggttggaagtgttggggtttttaggtgggtaggttttttagggttaatgttttggggaagttataagttattatgtttttggattgttatatatatatatatatatatatatatatatatatatatatatatatatatatgagtaaattgtaatataaatgtgtgtttatgaaagtgtttattttaaattattatatagtttgtaaagtgaaggttttggtttgtatttgggtatttattgtttagttagttggtaggtagtttgtattgtagtttgttattattttttagagatgtagttgaggagtttagttggtttggagggtttagtgggtgtagttttaggaaagtggttaggtttgggttaggtttttttttttttttagttttgggagaaattattatatgaatgtagtttttttttggagtttgggttggaagggtttgggaggggataggtttttattttaggagtttttaggttttggttgttgtttgtgttagttgtgtgagtgtgagtgagttaggggttattattgggtggaaggaagaagtgggtattttttttaggaggttattgttggagttttatagtaggttaattttaggttttgggtttttgggaggaggagaaagaagagaagtaggaggtgtggagggtaggttaggattagaaggtatatagggttggggtagtgtgggagattttgggggtttttttatttaattagttaatattatagtgtttataagaatatgttattattgtagttttattattttgttttgattttagaaggtataattgatgattttagggaatggagaatttgaggaaggttttgtaggagagggttagatgtgattgagtaaatgtgagttgtttgtaaattgtagagtgtatgtatagtattggttagttttggggttagtgtttttttggtgtttagtttggtttttgtattttttagtgtttggttgggttttgtgggggttagggttgggtttggtatattagaggatttttattaagtttttggtagtgttttagttattaaatttagtttgttagttattaaatttgttttgttggtttttgaattatttttttgttggggttggttatgttatgttaggttttttatgtaggatggtagatggatagatgttgggattaagttatttttgggttgtgagatgtttgattttttgttggtgttttagaagatgttagttttttgtggtatgttttttatgtggtgtttggggattagtggtttttaaggggtttttttgttttagtgtggggagtggtttggttaaggttttagtgtttggttggagttaggtataggtttaggtgtattggttggaggttttttgtttatgggttttgtttgttttgtgtttttggtttttattgtgttttttgtgtttttgggagagattttaggggttttgagtttagtattggggttggggagtgggtggggaagagggtggggattagggtttttggttgtagaatagttaggttttaagtttttattttattttttttttattgggtgttttattttatattgattattttttgaagaaaattttttgaattggttttttattttggttgttttaggaagtttatttatttttttgttttaatgttttgtggttttagaaggatggtggaagttggaaattatgagttttatttataggtggttatatattgaagttgtggagatgttgtgggaaaggattttggttagtgtggttggtatagagggagtggtgttattggggtagatgggaattgtggttgtttttatgttggtttgggagagatgaggggttggatgaaaggatagtagattggttatttatttatttatttatttatttatttatagtgttttattgggtgttttggatgtgtaaggttttgtgggtagtgaatgtgatagattttagatagtaattggagggttatgtgtgtaagaattgagggatttaggttgggtgtggtgttttaagtttgtaattttagtattttgggaggtagaggtgggtggattatgaggttaggagattgagattattttggttaatatggtgaaattttgtttttattaaaaatataaaaaattagttgggtgtggtggtgggtgtttgtaattttagttatttaggaggttgaggtaggagaatggtgtgaatttgggaggtagagtttgtagtgagtttagatagtgttattgtattttagtttgggtgatagagtgagattttattttaaaaaaaataaaataaaataaaataaaataaaaattgaggaatttagtgtagatgagttattttgggaaaataagtgggagttttaggaatagtatggggaagggatggttttggtagggaggatttttgtgggtagttttgttggaagagttgaaaggtagttagagaggttgtgtgtggatggaagttgaagagtaggttaggggtgtgtgttttgttaataaagattttaagtatttattgattaggtataatattatgtgttttataaataaatattttatttgatttttagtatttttatgagatagatgttattattttattttatatgtaagaatattgaggtatagagtggttaagttatttgtttagggttatatagtatgttggtggtaggtaggattttggagttataggaatttggtatattttaggtgtaatggaaattagttatggttttatagagggaaattattagattagtaaattttatatatgttttttggtgttttgaggaggagggatttggataggggtagttaatggtggtggttgtgagatgtgttgggttaatattgatgagagtttgggatggatgagtggatttggagtaatggaaatggagggtttaggtttggtttttggagatttagttgtaatagttgttggttggagaggttgtttatttagatgggggatggggtgggaggtaggtgagatgagagttttagagtttagtttggggtatggttattgggtttaagatgtttttagatgttggggtttgatagtgatagtggttgtagatatttaggatttagtagagggtttggtatagtggggtttagggatatgtttgtgagttaggttggtatttaagtgtgaatttggataaagaaggtggtattgttggtattgaatgtttaggggttgggtgaagttagttagggagaggggtttttaaggtattaggattgattttgtgggtgagggtggaggaggagatggtagaggttgagagaatagttagagataggaggaaggttagtagagttatgtatagaagtttggagaagatttgaggaaaggaagggttgggtggttgttattttttgtagttaggaggtaagggtgatttttgtgtgttttattttttagaggattggtggttttatttggttagaattttaagtttagagatgtatttgagttttatgttatggtgtaggtagtaggagttatggagtaggtttgtggggttatggtttgtttgttgttttttggtgtttttattttgagtttaggggttgtttggatgttttgtgttgtatttttttaggtggtgttttagagaggatgaaagtggttattttaaggtgtgattaggtagtggtttatgtatattgtttttttttggggagagtttgggatggaagggtatgtgtgtgtttttgagattttttgaataggttttatgtatttatttatttattttattatttatttatttatttatttatttatttatttatgtatttatttatttatttatttatttatttatttgttaatttatttatttatttatttatttatttatttatttatttatttatagttatttatttatttatttatttatttatttatttatttatttatttatttatttatttgtttatttatttatttatttatttatttatttatttatttatttatttatttatgtatttatttatttatttatttatttatttatttatttatttatttatttatttatttatttatttatttatttatttatttatttatttatttatttatttatttatttatttatttatttgtttatttatttatttatttatttatttatttatttatttatttatttatttaattatttatttatttatttatttatttattatttgtttatttatttatttatttatttatgtatttatttatttatttatttatttatttatttgtttatttatttatttatttatttatttatttatttatttatttatttatttatttatttatttttttatttatttatttatttatttatttatttatttatttatttatttatttatttgtttatttatttatttatgtatttatttatttatttatttatttatttatttatttatttatttatttgtttatttatttatttatttatttatttatttatttatttatttatttatttatttatttatttatttatttatttatttatttattaatttatttatttatttatttatttatttatttatttatttagttatttatttatttgtttatttatttgttaatttatttatttatttgtttgtttatttatttatttatttatttatttatttgtttatttatttatttatttatttatttatttatatatttatatatttatttatttatttaattatttatttttatttttattttagaaagtatttgaagttgttggggtgtgtatttggaaaatgtgttataagtttttataggtttttttttggtttttttatttttttgattggttttttttttggatatgtaggattttgagtagtttttttgggaggtgggtgtagtttaggtaggttgtttgtaaagttaggattgagggagttatatttaaggtattgtgggtttttaaggtgatggtattgtgggtttattgtttttagatttttttaatttttaggtttttgagtaggaggatttttggggtagggtttggagatgggaagagaaaataattttagttttttaatttttgttagtttaggtgggtgttgtatggattgggggtatttggaatagttggtttttttattttttttttttatttttttagtttttttggttataattagatagttgtgtgtgatgttttttttttttttgaaggggttatttagttaggtttttatttatggtttaggaatgtgtttttttttgtttgttttttatttttaagtaggttgtgtttttagttttttgttgtttttgaagggtttgggtatggggtagtttttgtagtatttttagggtttgagttgatttgtatagtagaagggaattgggggaaagttttttttttatttagtatttggtagggggttattttgttgtattttagagatttttgtttaagttttgttattttagatgattttataagttgggggaggtggagttttagtttttatagtttttgttgttgttttattgttgagttttgttgtgtatttgttgataggtttgttgatagtagaaggggttggagagagggaagttttgggttttgttttttttaatttttgtttaggggatatttttgataagaggaaattttagtttgtgatagatggttagtgtttatttatttatgggggaatttttttttttttttgtaagtttgtagatttgttaggaattaaaggaatttttggttgataggttattgtggatatggttggagggttggtatgggttggattttggggttgttttgaggtaggggttgtttttgttggaaggttttttggggtggggaaggtattagggttattttttgattttttttttgtagtggatttattttagagtttgagataaggtaagggggtagtagaaaatagaatataaaatagttttttttattatatattgtattagaagttagaggatttatttttggtttgttttttttgtagtttaagttttgagagtggttttttaggaagtgaatggtgatggtttgtaggttagagtttgttttggtttaagattgatgttttaataggttgtggagtttgggtgaaaaaatttaggttagggaggtggtgggttgtaaatgaaagaatagaggagggttttttttagaaagtggtgggtggtgtgaggagtttttggattttgtttaaatttgattttattgattggggttaattgaaattgtgttggtagaaaggtaaaattgtttgagatttttttttttataatagaggagaggtttgtttgaaagggtttggtgagggaaaagttggaggaattttggttggtagtaaaagtggggatttttgttttttgttttgggggtgttttggtttttgaatgaatgaaagaggaggttggatggagatagatttatattatttgttttttttaggttttgtaaaggagtatatagggtttttgttggtttttttattttgttagttattaagaaggagaaaatattaataggggaattgtaaagttgtagttttgtttaagttttatagtggaaattggaaagagttttagtttggagaaaaatgtagttttttgtttttgtaaatttgtgtttttttttgggaggttagagttattgtgtttgatttttaagtagggttttagagtgttttaggaggggaaggtagagttttagatttttggtattttaggttttaattaggttttgaggagatgttttttgttttatataaagtgtgaagtgtaatttgatttggagttagttaataaattagatgagttgtgtgtattttaaaaatttagtttttgattttttatttatatatatttgtataatttggttatttatatttagtgtttttatttttagaagagaataggaagtttttagtgatatttatggagtgtttgtagtagtttgggtaggttagtaggaatataatgtagtgaaaagtagagttgagatgggaaaatattttgtttttagagttttttagggatgatattttttattgtttttgtttatttgttttggagtttattttgtaaatagtaatttgtttttatttgagagtttttttttgttggagtttagggatggagagtagttggttttagttttttttttttatttttttgttttttagatttattttttattttgaataattgtttttaatttgtttttttttttttttagttgtagaatttagaattttgtgtgtgtggttaaaagtttagagagtgttgtaggtaatgttgagataattttattaaattttgtaagtttttattatattaagtttgtttgttttttttaatttttattttattttattttattttatagggatggggttttgttatgttgtttaggttggttttgaatttttgggtttaaatgatttttttgttttggttttttagagtgttaagttatttttttaattgggatttatgggtttagggattttttgatgaattgtttaaaatatgtgtgtgtttgtttgtttgtttttaatgtatatttttttagggagagtttttattttttattagaggtttgtggtatatatatgttttgtattattgtattagattgtgaattttttatatgttaaagattgttttaaatttgtttggaagttttggttaataaatatttaaataaatgaattttaaatttttatgtgttattattgtttttattttgattatttttaagtttgtagtgttatttttttgttattgtgaagtagatatttaataaatatttgttaaatgaattaatgttatggttttggtttattaggattttaggattattgtttattattattgtttatagtttttttattattttgttttagagtagttttttttttgaggtttgtttatttttgtatgtgtgtttagtttttagttttgttgttttattatttttttttttttatttgtattttttgaattgttaatagttaataatagtttttttttttatttatttatttatatttgaagtgagaagttattattgaggtttttgtggattttgttagtttaatttggggtggttttttggaggtggagtttttagatgagggatggatattttggtgtttgttgggtagatttatttgggagttttggtaggggttttagggtagttttgtttttttattttggttgtgggatttttggtgtattagggttttttaagtaagtatttgtgttttgggagagttataggtaggtttgagagggtttttggaatttgggatttttagtttggtttagtagttggtattattattttttttgtaagggaagttatggaaattaagatgttaatgtgttttgataggtttggggtggttttaagttttgggaagagttttggtaattttttttggttggtgggtagaatttttttttggtagtttagggttttgtttttagttttttgggggagagtaattgagggaggagttggaggttaaggttttagtgttgagttgtttgtattgtagttgtattttttgggttttggttgtaggaattttatatttttttagtttttttatggtttttgaagatttggtttggggagggggttagtagtttggggtttatttatttggttttaaattttggttttattgtttatttgttttgtgatttttataattgataaaagtttttttggttttggtttttttatttgtgaaatgggataataatagtggttattttataggattgtgtgatgatttattagttataatagtttttgagtagtgtttagagtaatatttggggtttggtgtagtggtttatgtttataattttagtattttgggaggttaaggtgggaggattgtttgaggttaggagtttgaaattagtttgattaatattagtgagatttattttttaaaaaaaaaaattagagtaatgtttggtatagagagtttttagtaaattttggttgttgtgatgagttttgtttttttatttgtttatttatttattagattttttgttggggtttgttgtgagttttatgttgttttgaagaaagttgggttggggtgagtgtgatggatgaggtgtttggttttataaattttgtgtgggggggttgtggtgagaggaaattgtatatattattatttagttattattgtggggagattgtttggatgtagagagtaggttttgtgtgggagtggggagggtaagttttggttgtgaggtagggtttttttaggatttagtagggatttgaaggattttgtaggtatttagggagataggagaggaggagggagtagttttggttggatattgtttttttagtattgtttgtattagggatttatttagttttaagaagtttttttgtgggggatagggagtatttgttagtttataggatttgaagtgtttttatgggtttaagtttttgggaaggtttgtaggtggttgtagggttgttgtaggggtgttggttttagggtttggatttaggggagtttgtagagggagggtagttggaggttgttttagtgtgtattgttatgaggtaaagtaaggagattgttgggtttatgttgggttggggtggatggaggtaaggaagtttttgttggggtaagggtattagttgtagatgttggtagtttttttttggatatgggtttggaaggttgatagggtgtggtgagtgttattggtttttttgttgtggtttggttagtggttttataggtttttgtgggtaggaggaggatgattttgtattttgtttggttattattggtagtgatagataaggtgtgtggggatgtggttattttggtttgtgttttgagagttaggtgtgggttgggtttggggaagataggggaatggtattgatttgattttgagtattttgttttggggtgtaggtttggttgttatttttttggagttgggaatggtattgggtggtggtttagggttttttgttttagtggtattatttttgtatttggttagtaaggttgatgggatttgtgtggatatttttgggatgtagattaggtagtatgatatatagggaggggtaggtagagaagggtggtttttgggttttggtttttaagttaggttttgtaagtttgttgtgttaagtttttttttggtattaggttaggtgggttagggttagttttggggttgtgatgagtgtgagtgtttttaaagtgtgttatgtttaatagttgttttttttttgggtattgttttttagttagatattttatagtttttgttttagttatagatagtaatttgatttttttatttttggtaggttttggggttggggtaagaatttgttattaagtgtagatgtttttagagggtgttggtttagggttgtgtggattatagtttttttatttttgttttagatttatttgtaattttggagaaaagatggtttagtggatgtttgtggggaggagggagttggtttttaggatgagtagatttgggggtagtttttattatgggattggtgatttattgttattagtgttagtgaatggtagaggggttttggtataaggtttgggtttagaatgggaatttgtagagaaattgttaaggttttttgttatttgatatttttgtttggttgttattttagaaatatttttgttgtaagaagatgggggagtttgtttggggtatggtttggtgatattaatttgagaattttaggtttaagtgttggtttttgggttttagttgttttttgagttgtaaagttggtttttgggtatttgtggaaaatattggattttttattttattttattttatattttgggatatatgtgtagaatgtgtaggtttgttatataggaatataagtgttatagtggtttgttgtatttattggattttttaatttagttttattagaaatgattgttttttttttttttttttgttttttttttttttttttttttttttttttttttttttgtttttttttttttttttttttttttttttttttttttttttttgtttttatggggatataatttttatattatattatttgttgatttagaaagtatagttgagtggtatttttttataattttttataagtattatttttaattttagaatgttttttttattttaaaaggaaatgttatttttggtatatagttatttttttttttttagtttttggaaattattaatttgtgttttgtttttatagatgtatttattttgaatatatgattagaattttaaaagatgtgattttttgtgtttggttttttgtagttggaatgtttttagagtttatttgtgttggtgtatgtttgtgtttttttatggttgagaaatagtttgttgtgttgatttagtatgttgggtttttttatgtatttgttggtggatgtgttagttatttttggagttgggtgtgttgtgttatttatgggttgtattaggagttggggatattattgagtaagttatagttttgggtatttaggagtttgtagagtaggagttgggagggaggttaggaggtgtatggtttgtttgttaggttggagagatttgtaaaaagttattttgagttagaaattagagtttgaggtttttgatttttagttgtggagttgggagggaagttttgtattttgttttgattgtggggtgatgtgttagttattgtttaaattagaatttttttgagagttgatgtgggtattgttgataattagtttggatatttgaaagaatggaaagtagggatttagatagatttttgtataattgtgtttgtagtagggtgaggtttggaggtgtgatggggattttaatggggtagttgttgttttgttggagtttatggtttttggggggggttataggtgttaattgtatattatataagtaggagtgtgaaattttagggttgttaaatttagtgagggttttgtgttggtttggttatttatagtggtattttaggaaaaaaaattattttatggattttagtttttttattagtaaagagtaggttggattggaattttgtattatttagtatagttgttatttatgaaatgtggttatttaaatttaaataaaaatagaaattttgttttttagttggattagtttagtgttaagtgtttagaagttatttgtgaatatattgtggtaattttttaaaaaatgaaaattagaattattgtagtattttataattttatttttgggtgtggatttaaaagaatgtatagtattttaaagagttagagatatttgtatatttatatttatagtggttttgtttatagtagttagtgggtagaaataatttgaatgtttgtggttaaatgaatggagaaattaaaggtgggataggttgggtgtggtggtttatgtttgtaattttagtattttgggaggttgaggtgggtggattatttgaggttataagtttaagattagtttgattagtatggagaaattttgtttttattaaaataaaattagttgggtatggtggtgggtgtttgtaattttagttatttgagaggttgaggtaggagaattgtttgaatttggggaggtagaggttttggtgagttgagattgtgttattgtattttagtttgggtaataagagtaaaattttgtttaaaaaaaaaaaaaaaaagggtggaatatataaggaatttgatttagttgtaaagaggaagttaggatatttgtaatagtaagggtgaattttttgggtattatgttaagtgaaataatttggttataaaaggataattttgtaggattttatttatattaggtttgtagagtagttagatttagaaaaatagtagaatggaggttgttagaggtttgggggatggggttggggagttgtttaatgaggatagtttgttttataagatgaaaaagttttggagatttgttatataataatgtgaatgtatttaatattattggattgtatattttaaaatagtgattgtggtaaatgttatgataattaaaaggaaaagttatgtggttagtggttattatgttgagtagtgtaggttttggatggtgttgtggttatagataatggagtgggtgatttttattattgtttttagttgtttgagtattatggtgttttggggttaggatgaaagtgtttttgggtatgggggtttttgttttttttatttgggagttttgaaggtagattttaaagtttatttggttaggtaggagagtgaggtgggtttttgtattgttttttgtgtgtgtgtttgtttgtgggttagttggggtttgtaaggttgttttttgagggaggggttgtaggaatggtttttatttgtgtagaaggtaagttattgttttatgttaatggtaaagatggggtttggttgtgttgtattattattttttaagtggggtttttggtgggtaggatgtttggtttgatttgagtttttgtagtgagtgttggtgtttgtggagggatttagttgtagttgagttggttttttttttgttttgggttttaggggtgttgggggtgagaaaggagagtttagggggtagtgtttttttttaggttttgttggggagggttgagggatgttggggggaggtgggggtgggtaggggttggttttagttttaggtaaaatggtttttagatttataggtagatggaagtgatttttggttatgtgggtggggattgaattgttgttttgtaaggtaaggttttatgtttggttttaggaagtggttttaaagttatatggtttatggttagatgtagggttgtgtttttgtttatttaaaggttttggaagtttaggggagagtatttttgaagggggagtaggagtaggagtaaagttttgaaggtttttaggttgtgtggtttgggtgggggttatgtgggggtatagagagaggagttttggtttttaggtttgtttgtgggtattgtttttagtagtggagatgtgtggatttttttttggtattttttaataaggaattatattgtttttttgtttttttaattttataagataggaatttttgtgttttgtggaggttgagaagatggggaggtgtttgtgaggataaattagtttttagtttttggtttttagagttttttttttttttatttttgatgttttaggtttggggagtttttttttgatattttttgattgttttagtgaaataggttgagagggatggtttgaattggttggggatgtaggttgtagttagggggtttagtgggtattttttgagtttggtttttgttttgtaagtggaagggtagttgaattgaagttttttattgttttttttggtttggaagtttgttttttattttttgggtagagtgaggagtgggtgtgggttgggagggttgttttttgtttgggagggttgtttatttgtttgttatgggggatgagttttttgtagttttttgtgttgtggttttggtttttatgttggttttatttttttgtggttgtttttgttgggtgtttattggttttagggaaaagttattttttttttggaggattggtgggaggggttttgtttgggagtgtgttgtgtggtttttgttttagtgtaggatgtttgaggttagattttttttgggaggtaggatggggtaaaagtttttttgtaggtagagtagggtttggatgggtttaagtagggatgggggtatagaatagtagttgtttagtttgtgtgggagttgagggttattaagggtagttttagtttgtggggattagtagaggtattatttttgtgattagtgagttgtttgtatttgtatgtgtatgtattagtgagtgtggtgagtttgaggtgtgttgggatttggtttgtgtattagttagttttgatgggaattagttttattttgggtatttttggaattttattgtgtgggagtatttgggtttttagtaggtgttttttgggtgtttgtttttagttttaggtttttgatttgtgtgtggtgttttaatagtagttaggagtagggttattgaagggatttatagatagaagaggttttagtgattttgggaagtttagttttatgtgttttatatatttaagagtaaaatttggttttggtttgtgggtgtgtagtttgtgggtgttggttaggtatataagatggttgtttgggttagtttagggggaggtagatgtggtgtaggggttttttttttttatgagtttaggaatagttttgtatttaggtatttgttttgtatttagtattttttttttttttaggattgttggtttgttttatgggattgaatatataattttatggggattgatgttggttttattttttttttttataagattatttatggggatgtgggaggtggggatatatgttggttttatttttgttttttataagattattttttttgtgttttggtttgtggattggtttttaaggtttttgagtggtagtaggtggtatagtttatttgagtagaggtgaaggagagggttaggtttatttgggtggtttgaggtagtgtggagggttaggagaggagagtattttttatttttgtttgagtagttttttagggtatggagataggagtttagggttagttttgttttggagtgtagggggtttttagtttggtatagtttttagaagaggagatgaaaaagtttggttttgggagtttggggatggagttttgttggggaggtagtgtggttgtaggatggtagttttttagaggatattatggttagggatatttatttgggggaatttttaggggttgtttgggtaagttgtttagtttttttgagttttagtgttttagtttttttatttaaggatgggtgtgataattatttggtaggtgtttgtgtgtgagtttttgttttgttttaatttttttgttgttttttttttagttattgaggtggtttttagttgtgttggtgatatggttgatatttttagagatgttgggtttaagtaggtgtttgtattatggaatgagaaggttttggtggattttggttatgtggggattgattttattttggagtagatgtgttggaaggttatgaagtagggttttgagtttaatattatggtggttggtgagtttttattttgtatgttatttaattaatgttggaaattagttttagtttttagggtggtttataagtttttgggtttggtttttttttttgtaaaatggggtagtaattttgattttaaggatggattgttagtgatattgtgtgtgtatgtatgtgtttgggaggagtttatagtttttagtggttttttagaggggtttgttttgtatatttagggtttttgagatgattttggggagtttaggttggtttggagtaggttttgatgagtggttgttgtttttgagtaatgatgttagtttgtgtagagggttttgtggtagttgtttttttattgttgttttagtttggttttttaggttttttattgtattttattgtattttggttagaggttttttagtagtttagttttagttttgttttggaattggggttttgtggtttttatattttttggtggttttggagagttggaggttattatgggaggttgttgattagtatgatttgggtagggtgagggggttaggttggagtttatagtgggttgtttgttgtttttaaagttttttaggttttatttaaattttatagggattttgtgaagggggtgttttgttttttaggtagaagtgaggtttagggaaggttgttaaggttttttagtttatagggtagagaattgtagttattgttttgatttttagaattgtgttttgtttattttatggggtttagggaggggtttggggaagtgtttttgttaggttatattttaaataaaggtgagtttgtggggtttttgtaaggtgtttgggtattttttaggttgggtttgtttttttgatttttgttagttgtgtatgttttttttgtttagttttgtggatgtaaatttatatttgttagtttgatatttttttttttttttttgtattgatttgggttttggtttttttggggttttggtgttttttttgttttttgtagttttatgggatttggttgtttatggttttgttgtgtttatagttgtttggaagttggtagtttgttttaagggagggtggaggtgtggggtttttttttatggtttttattttgttttgtttgttgtgggggatgtgtttgtattttgaggatttagggttgttttttgggaagatggttggagagaaagagaggggagaggtttaaaggtagtggttaggttgggatttatttttgtgggttatggaggggttgttttgttttttagttagggatagggtgagaaggatttgggaatttttgtgttttagttatggtataggtttttttttggagttttggttttaaggagagggagaggtagtttagtagtttttgttttttgtggttgttattgtgatagttttgttttttgggaatggtgtgtaggaggttattttatttgtttgggtttttttgtttttttaattttgagaagaatagtggttttgattttttataaaattatttttttttagggatgttgagtgaggaataagatgtggggtagttttgtttttttttttttttttttttatggtagttgtgtttatttgtagaggtgtaggtaaggtggaggggtatttgtttggaggtttatagattttggggagaattttagttttgttttaatttagtggggtgaggtttgtgtgtttttttttgggttttttttttgtgagttttagtttttttgtttataaaatgggattattttataaagtgagattaagtgagttaggttttgggtagggtttttaataggttgtggttgtttgagaatttgtagtagtggtgatggtggttgtggtgatgaggatgatgggggtggtaatgatggtgatgatgatggggtgatggtgttagtggagatgatggggatgatggtgatggtggtggtgatagtggtgggatggtagtggtgatgtgggtgatggtgattgtgatggtggtggtggtggtgatggaggtgatggtgatagtgattatgagggtgatggggatggtggtggtggtgatggtgatagtggtgggatggtagtgatgatgtgggtgatggtgatggtggtgatggtggtggtggtgattgtggtggtggtggtgatgatggtggtgatgatggtgattgtggtgatggtgatggtggtaattgtgatggtggtggtggtgatggtggtgatgatggtgattgtggtgatggtggttatgatggtggtaattgtgatggtggtggtgatggtggtgatggggatgatgatggtgattgtgatgggggtggtggtggtgattgtgatggtggtgatgtgggtggtggtggtgattgtgatggtggtgatgtgggtggtggtggtgattgtgatggtggtggtggtggttgtgatggtggtgatgtgggtggtggtggtgattgtgatggtggtgatgtgggtggtggtggtgattgtgatggtggtggtgatggtggttgtgatggtggtgatgtgggtggtggtgattgtgatggttgtgattgtgatggtggtggtggtgatggtgatgatggtggtgattgtgatggtggtgatgggagtgatgttggtgattgtggtggtgaagggggtgatggtggtgattgtgatggtggtgaagggggtgatggtggtgattgtgatggtggtgaagggggtgatggtggtgattgtggtggtggtaatggtgatggtggtaaaggggtgatggtggtgattgtggtgatgtgggtggtggtggtgatgtgggtggtggtggtgattgtgatgggggtgatgatggtaatgtgggtgatggtgattgtggtggtggtggtgatggtgatgattgtgatggtggtgaagggggtgatggtggtgattgtgatggtggtgattgtgatggtgatgtgggtgatggtggtgttgatgggggtgatgatgttagtagtggtggtgatagtgatggggatgatggtggtgttgatggtgatagtggtgggatggtagtggtgatgtggttgatgatggtgttggtgttgatgattgtgatgatagtggtggtggtgatgagggtgatggaagtggtgatgatggtgggagtgatgggatgatggtaatagtagtgatggtattgtgatgatggtgttgatggggatggtggtgatgataagggtgatgatgatggtgatgataataataaaagtaataataataaagggatatattttgtagtattttagttggtattttttagatttaaggtgttgtggttggaatattgatataatttttgatttgaggttggttaggatatagatttggtggatagagagagatggatgaggagtgtttgtttttgggttattaaatagtttaggttagggatttttagtattagtttttgtttttttaggagtttatattttttttagaaaggtgttattaaagttagaatattagtgtaatttagggtgttttttgtgttgtgtttttttgagatagggttttattgttgtttaggttggagtgtagtggtatggttttgatttattgtagtttttatattttgggtttaagtgatttttgtgttttaggtatgtgttattatatttggttaatttttgtgttttttggtagagatagggttttattatgttggttaagttggttttgaatttttgattttaagtaatttattttttttagttttttaaagtgttgggattataggtgtgagttattttgtttggttgatttttgtttttttaaaagatagggtttttgttattttggagtggtaatgattttagtttattgtagttttgtatttttgggtttgagtaatttttttattttagttttttgtgtagttgggattataggtgtttgttattatatttagttaatgtttatattttgatgtagagatagggtttttttgtgttgtttaggttggttttgaatttttgggtttaagtaatttttttgttttagttttttaaagtgttgggattataggtatgagttattatatttggtttagggtattttttttggtgtgttgttagtgtagtttaaggtagttttgtgtagggtaaagtaatggggttttgagtttggaggggtgtgtgtgtgtgtgtgtgtgtgtgtgtgtgtgtgtgtgtatgtgtgtgtgtgttatatgtgatttgtttgtgtgtgttgtgagagttgtgtgtgaggtatgtgtaagaggtatgtttgaggtgagttgtgtgtgtgttgtgagttgtgtatgtgaagtgtgtgtgttgtgaggtgtgtgtatgaggtgtatgtgagttgtgtgtgttgtgttgtatatgaatgttatttttttatttttgtttgttttagttatttgtggattggttgtttgtatatatggttattgttttttgagtggtattattttgtaggttagtgttttttagtatatggttttatagattttatgggatatgtgtgagtttgtttgatgtttatattagttttatgggggaaggattgtttattttattttgtagattaggaaattgagatatggtgaggttaggtgatttgtttaggttttggttggttagggaggagtagtttgaatatttgggttttggttgtaattattttggtgaattgtaggaattttggttatttggtgtattttgggtagttttgggtttttttgttagtttggtttttgttttgtttaaaatttgagttattaggagattttttgtttagaaagtataaggggtataagagatgttgatttttttaggtttggtttattttttaggagaggattgtggtttgggttgtgttggtattagagtttggttgtgtgggtttatatagttattggatatttggtttgagggtgaagtttttgggggttgtttggtagggatattgttgggaggtagtttaggtattgttgaattttagattggagagttttgtgtttgggtgggaggggttttatgtgtagattttgttggtttttttggagagatttttgattggttttttattttttttttagggtagagtggtttgggtaaatttattttaattaatattttttttaaatttaaaattagttggaagttggtgtagtttattttagaggagtgtatttttaagattattgagattaagtttattatgtatggttagtggttgggagtgggttgggggtgtaggatgtttttgtttttttggagtataggggttgggggttaagattattatatatagttagtggttaggggtgggttgggggtgtaggatttttttgtttttttggagtatagagtggggggttaagattattatatatagttagtggttgggagtgggttggggatgtaggatgtttttgtttttttggagtataggggttgggggttaagattattatatatggttagtggttggggatgggttggggatgtgggatatttatgtttttttggagtattggtgtggtgtgagggtgtttgagttaggtaattttaggtttttaagatggggatttgttgtgtttattatttttagtatgttgagtatgttggggttttggttgtgatgggttagtgttttggatttttgtgggttttgttatattgagttttttatagataattgagttttttattaaaagtttgataggtaaggggtttttaggggaattgttattggtttgtgttggagttggttgaggaaggttattaattttttggtgtttttttggttgttattgttgtttatttggggttgttttggggttagttaggtgtggggtgtttgtgagggttttttgttttttttttgattttgtgtttgtggttttgtgtagatattgaggagaaaggtgtttggatgaagttgatagtgattgatatattagggtttggggattatattaataatgagaattggtgaggtttttttagggggaggagtattagtgggggttttagggttttttggattttatttagagttagttttagaggttttttggtttgtgggggtgtagggtttattttttgggatttgatatgttgttaaagttgtatgttttaggggtttgaaaattttggattaaagtagaattatttggggaattttgttgtttttaatttattatttgaggttagtttggggaggttggtttgggaggttgagggtaaggttgtggtatttttgtttagtaagttagattttttagggtatgtattttattggaaggtggggtgttgggttttgagttttgggaatgtatgatttgtttggggagggtattttatgtgtttgttgatttgtttttattttttatgtagttggtagtttattatgaagtttattaatgattagtatgagaaatatttgtaggaggaggttaatattaattgtaagaagtgtattttggatatttgtgtttattgttgtttttattttatttttgttattggttatttgtatgtttttgtagtgttggtgtttttatgttgggtgttttgggttttttttgttttttgggattgtaagatggtgttgtttgttttgttgttgggtgtagaggggttgagttaggggttatggttgttagttatgaagttgggggtgtgttatgtttgtatttttaaagttttatattgatttttatgtaagtgttttgtttagtttttattttttagttgtgttttggggagttgagggttaggtaggttttgggttgttttggagtttggtggtttgtgttttgtttttttaggttaggttttggtaggtggagtgggagtttttagttaagtatttgtagtggtgattgatttttttatttgggttttgttttatgggattttttagagggtttggtgtgtttttagatgggaagtatagagattagtgttggttttttttagggttggatggggttgttgttggtgttggtgagagttttttttttttgttggttttgtttgtatttgatgttgtttttagagattagtaagggtgggaggttgtatgtattttggtaggtggattttttatggttttatggattttttgtttttagttttttgtgtattttttgttagatatttgtggtttattttgagttagggttgggaggaggaggattagaggttagtaggagtggttggtggaggtagttgtgggtggtttgtttgtatgggtgggtggagaaggttttttgtatttgttgttttagatgtatttttttgggtggaggaagtttaggggtttggggaaattatattttgtgggtattaggtgtaggaaggagtttggttggtgggtagtgggttttatttagagtttgtgggaaaatttaagttggagtttttgagtttattttttggtattattttttgtgggttagtaggagttaggggtagggggttagtttgttgtttatgggttttttttgaattgaatatttgtttttttaggtagaatggtttatttgtggttttgtggtagttgttttagttgttttaagttttgttttagttgaggttgatggtaggaggtagaagttttttttgatgttagttgggtaagttgagggtgggtgggtggtttgtggtatttttgttattttttagtattgattttttggttgggattttagttaggtatgttgtttggttttgtttaaggtgtttagttttatggggtaggggtgggttttggttatttttgtttaaatttttgtttggagtgggtttttttttagttatgtgtgtgattgatttatttttattgtgggaaaagtttggttttagaattggggaagatggtgttttagttttagggttttgttagtttttgttatttatagttttttttatattagattttaggtttattggggttaagtaggtaaggggagtagtttgtttggtgtaggggagtagtttgtttggtgtaggggtattgtatattggtgttagtttttattttttttgtttttttttttttagttaaagttttatagtaagatggttgttgagttaatgatagtttttttgtgtggatatgtaggggtgtggttgggattttagaatttatggatgagggtgtttggagttggttttggtttgtttggtttgtgtagtggtgttatttgtgtttgggatatatttgtgttttttttttgttttatatttatagtgtggttgatttggtttggggttttgtttttgttagtagggatttttgtgagttttgagttagtatttgagagtgttgatatttgtttgggggtgggtgtttttttattgttttgtttttttagatgagttttatgtatatttttttgttttagttttaggtttttggatattgagtttatgaaatgtttgagtaaggtggttaatattgtttttgttattgttaaggtggatatatttattttggaggagagggtttattttaaatagtgggtagggttttatttttatttgttttagtttttttgtgtaatttggagatgttgtaggtttggtaggggttattttgtttaaaggagttatattgttagggagattgaattgttggttattttttttagtgggtggttggtttggtggtttttggtttaggtggttgttgggggttgtttttgagatggtttttttagtttttttatattttaaaagtagttttgtgggagtgttaattttttagtagagtttttgaggggggttttggagaagatttggattaggtagatggtgaattttttttttagggagtgaggttgagtaggggttgtgtgatatggtttattttgttttatgttttttttttttttttttgagaaagggtttggtttagttgttaaggttgtaatgtagtggtataattatggtttattgtagtttttattttttaggtttagtttttgagtagttggaattatagatgtatattattatgtttggttaatttttgtatttttagtagagatgaggttttgttatgttgtttaggttggtttttaatttttgggtttaagggatttttttgttttagttttttaaagtgttggggttataggtatgagttattttattttgttttgtttggtttttattagatggaagagaagttgggttaggtgtggtggtttatgtttgtaattttagtattttgggaggttgaggtgggtagattatttgaggttaggagtttgaggttaatatgatgaaattttatttttattaaaaatataaaaatattagttgggtatggtggtgggtgtttgtagttttagttatttgggaggttgaggtaggagaattttttgaatttgggaggtggaggttttagtgagttgagattgagttattgtattttagtttgggtgatagagtgagattttattttaaaaaaaaaaaaaaaaaaaaaagttttaggagggatggtttttgttatttttttttttgttattgtttgaggtttttgttgtgggatagggaggggtatttaagtaagagggtagttttgggtttttttttttgatagggtagtatattagagttatatggggtgttttttaaaatgaaattgaggtgtttgggttgtggtattatatttgttttggtgggtgtgggtggggtttgtaatttattttgttttggggttaggtgttagggatttttttagtatgtgtaggggaagatagtttatataaagtgggtgtgtttgttggaggttatatatgggttgtggtttgtgtttgggtaggtgagtagttgtttattgggatgtttttgttgtatgtatttatgttgggttgttggtagggagttgagaggttattgtaggtggggtttttgttggaattggggattgtgatgagggttttttaggaagggttttaggaggggaggttttggtaattttgagtatttttttggggttgtgatgagtaggagaagagaggtgggaggtgtttaggatgatgattttaagtttttggggagttgtagtgttgtttaggatagtaggtgtatttgtagttgttttttttttttttaggaggtataggagttggaggtgattggtgttatagttttttagagtttgtttttgaatttgagtttggggtagtatatagtgtggaggttatgtggtaaatattagtgggtgggtagagtttgttatagggatgggtttatttttttttttttttattttagattattgtagatttgttgtttaatggtattgatgtgtatttttagaaggaatttgatgaggatttggaggattggttggtgaatgagaagttttgggtgagtggatttattaggatgttgtttttaggggatttttagtttttgttgaagggtgggttgggggtttggaggattttaagttatgaaattatatttttggggttagagggtattgagtttaggtgtttgtatttagtgttgttaggttgaggtttttgtttttgggggattttaggtttagggtagttttttttgggggtttaggggagggaattgtttttttgtatatgtgtaattaatattgtttgtttgttttttaggagatgattttatttgttgtggtgggtagtgattatgagtattaggttaatggtaagaggatttttgggaggaagattaagtggggtattattgaaggtatttgttgtaggtgttggggttttagatagatgggaagatagttttttttgttgatttagagtttgtgggttatgtttgagttagggatttgtggaattttatttattgttttgttttatttagagggaggggtttttttgtttttatttaatttttgggaaagtgagagggtaagtggtttgtgtagatgtttttattttagatttttttttgggtagggaaagatttagggagataggagttgggatgggggttgttaagttttggattttggtgtaggtttttttataggtatttgtgtggttttggataaattgtttaatttttttgggtttagaaaaggggtgggttgtagttttgtgagttagatggatttttggttttttattttgttgaagtttttgggatttttatattttagttttttgagtggttgttgtaattaattagtataaatgaggggatttaaaataatataaatgtatttttatagttttagaggttagaggtttgaaattaggggttgtttttttttgaggttttgaggattagttttatttatgtttttttttttttggtggtgtttggtatttttagttgtattgtaaaggtattatatgttttaatttttgttttattgttatagggtttttttttttgtgtttttgttttgttttttttttttttttttttttttttttttttttgtttgagatggagttttgttttgttatttaggttggagtgtagtgttgtaattttagtttattgtaatttttgttttttgggtttaagtaatttttttgttttagttttttgagtatttgggattatagttatgtattatttatttgatttaatttttgtatttttagtagagataggattttgttatgttggttaggttggttttaaatttttgattttaggtgatttgtttattttgtttggttttttaaagtgttgggattataggaatgagttattgagtttgtttttttttttttttgtttttggataaggatgtttgtttttggatttagggtttattttaagtggatgattttatttggagatttttaatgaatttataaagaaagatgttttttaagtaaggttataattatgggttttaaggtttggattttgattatgtttttgaatggatgggagtttttggggggttatagtttaatttatttttggtggtgatattttgggagggatgggtttgaatgttttttttttttttttttttttgtttttttattttttattagaatggaagaggggaaggtgtagagggaaatgtagtaggaaaagttattttgttttgggagagtatttggttgaaaggtttagtagagtaggaagtataagttttttaattttttagggttttagtttttattatttataaagtgggtgtagtgtgttaagattttagtgagttgagagattgttttaaagattatagagttttttgggaagttgttgttttaaaaaaatggttataatgataattattaggaggtattagatatttttgtgttattggttagatatgggttattttgttttatgtttgaagttttttgtatttattttttttgtagagttgaagaggtgttgtgagtagaaaatttgttaagggatttagaatgggaggtggttttagaatttatagttttagttttgtattagatttttttgagatgggagtttatgtttggaggagggtgtggagaggtatatgggttttttttttgtttgtattttttttttattattatttttgttgggtttattttgtgggagttgtttagttgggtgtagtttgggtgttttttagtatttgtttgtggtgttaggttggtttgtttttttttggtttttttgtttgtagtttttttttttttttttgtttaaagagtttttgttgtttaggaaattttttatgaaaggtaggtttgggagagttagggatggatgggtttgggatgggttggtggttttgttatgggtgtgtttttgttgtattttggtggttaattttgagtattgtaggtggttggtgatagaaattgttaggaaatgtataagagagaggtttttgtatttttttgatttgtgtgttgttgagtattattggttttagttgaggaagagtttggaatttgttaggatagttgtgaggtggtggggtttattttttagtagttttatatgaggattttggaaatgtgtttttagtattgttgggtttttatattaggggttttatgagtttatagttgatttgatatttggattagtaagggttgtgttttgtttttgttttttatttggtgaatagtattttgaggtattttttttatttttagaaattattttaagtattgttaatagaaatgtggggtgtaattgattatgttatgaatttatttaatttttatgtttttgagaggtgggtgatgttattatttatattttatggatgaggaaattgagggaatgagagtaatttgtttgagttagggagtggtgattatatattttaattttagtttgagagttttattttttttgttggtttttgttgtttgttagtgttagatgagagtgttgttggttagtttgtaggaggttttagtgtggatattgttttatatagggttgtggtaggagggtttaggtaaaggtaattggtatagtattgagagtatttgagggttgggtaaggtggaggttttggttttgtttgttggtttattaagtaaaaattagatatttttaatttggggaaaagttatgtggttttgtgatggggtagtttggagttaggtgtatgggttttgtattttgttttagttttatgtattgtggagttgagatagatatagtttttgtgttttttatgttttattttttttttttttttttttttttttttttttttttttttttgagatgaagttttatttttttgtttaggttggagtgttgtggtgtgattttggtttattataatttttattttttgggttttagtgatttttttgttttagttttttgagtagttgggattataggtgtttggtattaggtttggttaatttttgtatttttaatagagatgagattttattatgttggttaggttggttttgaatttttgattttgtgatttatttattttagttttttaaagtgttgggattgtagatgtgagttgtggtgtttagtgtttatgttttatttttgtaagataatggggataataaaggaattataagagatatttgtaggtgtgtgaagatgaagtttattatatgggagggtattgggtgtttttatttgttttttttgtttggttttttatttttagtgatgttgtttattgttttttttgttaaaaggttttttgttatataatagttatatatgttaggtattgtgtgtttatataggagttatgaagtatagtaataaaatgattattttgagatggttattagtttgagtttgagggtatttgtgggtgtttgtggttttttgtttagtttttttgagaagtggttattgttttgagtttgggtttgtatgtattgtgtgaagtgtatatgtttttgagtaatgtttagtattgttgatttttgagtttgtgaatggttgtttatagtatgtagtttttgtgtgtgtttttgtgtgtgtgtgttttgagtgtatataaggtggatggggttgtgggggtaatattttgtgggttataggttttttttaaaattttagttttgatttttgttttattttatttttagtagtttagttttttgtttgtttttaggtttttgttgggatgttttgttttttttggttattttagtggtgtgggggtttattgttttggtttttttattgtggtttttttttatgtttttatttggtttggttattgtgttattttttattagttaggaattttttggagagtaggagttgagttgtttaggagtaggagttggtgttggttattttagtattttttagattgagggtagtgttaggtgttttatatttagttgtagagtaggtggtttttttgtttttttgtttatggggttgtttttagattttgtttttggtattagtatttttgggtagggggagagaggtggggtttgggtagagtttttttattgggatattaaagttttttttgtttttttttttagttgaaaatattatatattgtgagtttgtttatttgtgggatttttttattaggtgagagatagggtgtttgggtggggttgatggttttatttttaagagggttttatagtgggtgggggtagtgggtgtggggttgaagttttgggtagagtgggtgttttttgttatttgtttgttttgtttttgggaagattttggaagtttattttttgaaaaagaaaatttattgggaaatgaagtaggtagtgaagattttttttaatttttgtgaagttggttggatgggaaggttgagttttgatttattgtggtttggtttgttagagttgtttggtggttattaagggtttagtgaggttttatgtgtaggttttgttggtagtgtggggtgtttttagttttgattttattggtttttgatttttattttttttatttggttgaggtttttttttgttttttttgagtttaggtaaggaggggaagttttgatggagagggtgttgggtgggtggtttttggagtgtgggttttggtttgggtaggtttttttttagtaagtagttggtatggatgatgggaatgttattaagaggaggggtttttaggttggtgggggtaggggtggggggattttgggagttgttttgttattgtggggatattgggttttttaatttttttttagattattttttttgagttgtagaggaatgaaaatttgagtttaggattttttttttttggggataagggtaatttagttttttgttttaggttatttgtttgttataggttatagttttggaggttggtggttatttattgtttttattttgttagtattttggatattggtttggagtaataatgttttagttttgtttttttgagtttatgtattgtttttgggttttggatttagggttatagggtggatttagagggagatatatgtattggaatatgtgtgttttgattgagtttgggtttattagggggattgattttttttttaaaatgtgtattagatttggtttaatatggtgggtttgggggattttatggggagttaagtagttgggatggggagtgggggtgggggtaggtgggtttgagtttgaggtaggttgagtagggtttttgttttgttgtttttattttgttgtgtttattttattgatttgtttgttttttatttttataggatgtatatgtagaatattaaggatattattagtagtatttattttgaggtgtattgtgtgaagtgttttaatgagggtagtagtgttatggttaatggtatggaggagaaggagttagaagttttggagatgtagatgttattttgtttatttttgggattttgtttttaagttatttttgtttttttttaggtttttttattattttattttattttatatgattttttttatttgttattgttttttatttttttgatatgttgttaggaaataagggaaggggtttttttttgagtgagttagtgatgaggttgtggtttttttgaggttgtggggaggttgtattggagttataggtaggggtgagagtatttattgaattgatatgattttttgtttttaggtttggttttttgagggtttagaagagtagttttggtgtgtagattatttgtttgtgtggggtttttagtgttggaggttttggggtgggggttaggttttgtatttgtagaggagtttagtgggttgtatgtttttttttatttttattggttttgttttttggagtgtgttagagtttaggggagaatgtagtttattaggagtatttggattttttgtttgttatatggtgtggttattatttagtttttatttttgttttgtttttaagggtagaaaattttagggttttttgttattgattgtttagttattttaagttttttggtagttgttttttttggagtagaaagtgtttttattttagttatttgtagattgtttggttagatgtggggataggttggaatgagggaggtgtttttatttttttgttattttttttttatgttatttttgtttttattgggttgtaggtgttgttgatgtgttgggatttgattgaggataaaaaggaaggagagatgatttttatttttttattttttagttttgaaaaggtttaagtaagtgagtttggtggaggagttgagggagggagttatggaaggtgttagaaggaaggttggtgggggtatgtgtgggttgtggtttgggttggttagagtggtgtgagttgtttggtgtttgttttgtttaagtgattagggaagtgtgtgtgtgtttatgtgtatgtgtgtttgtttgtttgtttagtgtttgggtttggtttaagattgggttgtagttatattaatgtttagttagttatttttgttatttattttttttggtttaggttttgttgattttttgagttggggaggtgggaggttaggtgagtttgattttgttgatttatttgtgtttgggtttttttttttagagtttatggtaatgaatttttagaaaggagagaatgggtgttaggggtgtatagtttatagttgaagagtaaggttttgtggtagtatggtttggttttttattttttgtttttatgaggggatttatgggggttgtttttgtagggtatagatgattaaagtttttttttgttttttgttatttgttttgtttttggggagaaagaggggtttgatgagattttatttaggtgtatatattattaggtgtatttgtaggtattgggttggttgtttgtagttaggagaaggttagtgagaaggagtgtatgagtgtgagtgtgtgtgtatggaagttggggtattgggtgtttgattttttttttatttaagagaggaaggattttttattatttttattggtgagatagtttattttgttaatttgttatgtttttgttaaaattaagattttgaaggaaatgagtggttagtgttagggtttaggttatgtggtttgtttagttttaatgttatttggtggtggggtggggtgggggtgggtagtagtattttagttttgagatgttttattttttttttttgtaattagattttgaaaaattgtttgttttattaggttttgttttttaatggttttttgttatgtgttttttgagaaatttgtttttttgtataaatgataaagtgttgaaaatgtattttttgaaataaatgttttaaatgtagaaattta

SEQ ID NO: 10 - DNA, 221909 bp, Artificial Sequence
  chemically treated genomic DNA (Homo sapiens)
tgggtttttgtatttgaaatatttattttaggaaatatatttttaatattttgttatttatataaaaagataaattttttgggaggtatgtagtaaaaggttattgaggaatagagtttgatgaaatgaataattttttaaagtttggttatagagaaggaaagtgaagtattttaaggttgggatgttgttgtttatttttattttattttgttattaagtgatattgaggttgggtaggttatatggtttgggttttggtgttggttatttattttttttaaaattttggttttggtaaaaatatggtaagttggtaaagtaaattgttttattagtgggggtggtgaggggtttttttttttttgggtggggagggagttagatgtttagtgttttaatttttatgtatatatatttatatttatatatttttttttgttgatttttttttggttgtaagtagttagtttggtgtttgtagatgtatttggtgatgtgtgtatttgagtggagttttattaggtttttttttttttttaggagtaagataggtaataggaagtaggaagggattttggttatttgtgttttgtaaagatagtttttatgggtttttttgtggggatagagggtgaggggttgggttgtgttgttatgaaattttgttttttagttgtggattgtgtatttttgatgtttgtttttttttttttaggggtttgttattatgggttttgaggggaggggtttaggtatgggtagattaatagagttaggtttgtttggttttttatttttttagtttagagagttagtaaggtttgggttaggaagggtgagtggtaggggtggttggttgggtattaatgtaattatagtttagttttgggttaaatttagatattagatagatagatggatatgtatatatatggatatatatatatttttttggttatttgggtagggtaggtgttgggtagtttatgttattttgattagtttaagttatggtttatatgtgtttttgttaattttttttttggtattttttatggtttttttttttagtttttttattagatttatttgtttagatttttttaaaattgggggatgagggggtaggggttattttttttttttttttatttttaattagattttagtgtattagtagtatttgtagtttggtgggggtgggggtggtgtgagagggggatggtagggagatgaagatgttttttttattttagtttgtttttgtatttggttaagtagtttgtggatggttgagataaaggtattttttgttttaggaggggtagttgttagggggtttggagtggttgggtagttggtggtaggggattttggagttttttatttttaggagtagggtaggggtaggggttgagtgatggttatattatgtggtgggtagggggtttaggtgtttttggtgggttgtatttttttttgggttttgatatattttaggggatagggttgatggggatggaggggagtgtgtagtttattgggtttttttgtaagtgtgaggtttggtttttattttaaggtttttggtattgagaattttatatagatggatgatttgtatattgaagttgtttttttgagtttttggggagttaggtttggggatagagggttatgttaatttagtgggtgtttttatttttgtttgtggttttagtgtagtttttttataattttggggaggttgtggttttattattgatttatttggagggaggtttttttttttgttttttggtagtatgttgaaggggtggggaatgatgataaatggagaaaattatataaaataaaatggggtggtgggagggtttggggggggatggaaatgatttgggggtaggattttgggggtgggtagggtggtgtttatatttttggggtttttggtttttttttttttatgttgttggttatggtgttgttgtttttgttgaggtgttttatatggtatgttttgaagtggatgttgttggtgatgtttttgatgttttgtatgtgtgttttgtgggggtggggggtgggtgggttagtgaggtgggtgtagtggggtgggggtagtggggtaggggttttgtttggtttgttttggatttaggtttgtttgtttttatttttattttttattttgattgtttggttttttatggggttttttaggtttattatgttggattagatttggtatatgttttgggggaagggttagtttttttggtaagtttagatttggttagaatatatatattttagtgtatgtgtttttttttgggtttattttatggttttgggtttagggtttagggatagtgtatagatttagagggatagggttggagtattgttgttttaggttggtgtttagggtgttggtagggtggaagtagtgggtgattattggtttttaggattatggtttgtggtaggtaggtggtttggggtaaagggttgggttgtttttgtttttaggaaaaaaaagttttgggtttggatttttatttttttgtagtttaggaggaataatttggagggaggttggaaagtttagtatttttataatggtagaatggtttttggaatttttttatttttgtttttgttaatttggaggtttttttttttgataatatttttattatttatgttagttgtttgttgaggaagaatttgtttaggttagggtttatattttagggattatttatttagtattttttttattagggttttttttttttgtttggatttaagggaaataaggagaagttttagttaggtgaaaggggtaggggttagaggttagtgggattggagttggagatgttttatgttgttggtagggtttgtatatgaggttttattgggtttttagtggttattgggtagttttaatgggttagattatagtggattaaagtttagtttttttatttagttaattttgtaggggttgaaaaggatttttattgtttgttttattttttagtgggtttttttttttagaagatgggtttttaagatttttttgagggtagggtaggtaggtggtagggggtatttattttgtttagggttttggttttatatttattgtttttatttgttgtagggtttttttaggggtgaagttgttagttttatttaagtattttgttttttatttgatgagaaggttttgtaggtaggtaaatttatagtgtgtggtgtttttaattaggagaggagataggaggggttttaatgttttagtggagaaattttgtttggattttatttttttttttttgtttagaaatgttggtgttaaaagtagagtttgagggtagttttatgggtaggagggtaggggaattatttgttttgtagttgagtataggatatttggtattgtttttagtttgggggatattggagtgattagtattagtttttgtttttggatagtttagtttttgttttttagaaagtttttggttaatgggagatggtatagtgattaggttaaataggagtatggaaggaagttatagtggagaagttagggtagtgggtttttgtattattggggtgattagggagagtaggatgttttagtaggggtttgaagataggtagggggttgggttgttgggaatgggatgaagtaggaattggagttgggattttaaagaaaatttgtggtttatagggtgttatttttatggttttatttattttgtgtgtgtttagagtatatatatatagggatatatataggggttatgtattgtggatgattatttataagtttaagaattagtaatgttaaatattgtttagggatatgtgtattttatataatatatataagtttaagtttgggatagtggttattttttagggagattgggtaggagattatgggtatttataagtgtttttgggtttgagttggtggttattttagagtggttattttattgttgtgttttgtaatttttatatgaatatgtggtgtttggtatgtgtaattgttatataatagaaggttttttaataaggagggtagtgaatggtattattggaggtggggagttgggtagggaaggtaaataaagatatttggtgtttttttatgtgatgaattttgtttttatatatttgtaagtgttttttgtgatttttttgttatttttattattttatgaaaatggggtgtagatgttgggtattatggtttatgtttgtaattttagtattttgggaggttgaggtgggtggattatgaggttaggagtttgagattagtttggttaatatgatgaaattttgtttttgttaaaaatataaaaattagttaggtttggtattaggtgtttgtaattttagttatttaggaggttgaggtaggagaattattggaatttaggaggtggaggttgtggtgagttaagattatgttatggtattttagtttgggtaaaagagtgaaattttgttttaaaaaaaaaaaaaaagaaaaagaaaaagaaaagaaaagaaaatgaggtatagagaatgtaagaattgtgtttgttttagttttatagtgtataaggttggagtgggatgtagaatttatatatttggttttaggttgttttattgtagagttatatggtttttttttaagttaaaaatgtttagtttttatttggtaggttagtaggtagggttggggtttttattttgtttagtttttaagtgtttttagtgttatgttggttgtttttgtttaggtttttttgttatggttttgtgtagggtggtgtttatattagaattttttgtagattgattagtagtatttttatttaatattgatgggtagtgagagttggtaggaagaatggggtttttaggttggagttggagtgtgtgattgttattttttggtttgggtaagttatttttatttttttagtttttttatttataaaatgtggataataatgttatttgttttttagggatatgaggattaaatgagtttatggtgtgattaattatattttatatttttattgataatatttggggtggtttttaaggatgggaaagatattttaagatgttgtttattaagtgggaggtaagaataaggtatagtttttattagtttgggtgttaggttagttatgaatttatggggtttttgatataaaaatttagtagtgttgaaggtatatttttagggtttttatataagattgttggaaagtgggttttattattttataattgttttgataggttttagatttttttttagttggagttagtggtgtttaataatgtataggttagagaggtgtggggattttttttttgtgtattttttgatagtttttgttattggttatttgtggtatttaaggttggttattagggtgtagtagaggtatgtttatagtaaagttgttggtttgttttaggtttatttatttttaatttttttaaatttgttttttataaaaagttttttaaatagtaagaattttttgggtagagaggaagagaggaattgtaggtagaggggttaaggggaggtaagttagtttgatattataggtggatattggaaaatatttaggttgtatttagttgggtagtttttgtagggtgggtttggtaggggtggtggtaggggaggagtgtagataggggaaaggtttgtgtgtttttttatatttttttttaggtatgaatttttattttgagggagtttggtgtagggttggagttgtagattttagagttgttttttgttttgggttttttggtaggttttttgtttatagtatttttttaattttgtaaggagggtgggtgtggggagttttggatatgaaatgagataatttatgtttagttagtggtataggagtgtttgatgttttttggtaattgttattatgattatttttttagagtaatagttttttaaaaagttttgtggtttttgggatagttttttaatttattaaaattttggtatattgtatttattttgtggatgatgaaaattgaggttttggaagattaagagatttgtgttttttgttttattgggttttttagttaagtgtttttttagaataaagtggttttttttgttgtatttttttttgtattttttttttttttattttaatgagaaatgaagggatagagagaggaaggggaaggaaatgtttgggtttattttttttggggtgttattgttaggagtgggttgaattgtggttttttaggggtttttatttatttaaagatatggttaaggtttaggttttggaatttatgattgtgattttatttggaaaatgtttttttttatagatttattaaggatttttaaatgggattatttatttagggtaggttttaagtttaaagataggtatttttgtttaaagataagaaggaaagagggtaggtttggtggtttatttttgtaattttagtattttgggaggttaagtaaggtgggtagattatttgaggttaggagtttaagattagtttggttaatatggtgaaattttgtttttattaaaaatataaaaattaagttaggtgggtggtatgtgattgtaattttagatatttgggaggttgaggtaggagaattatttgaatttaggaggtagaggttgtagtgagttgagattgtaatattgtattttagtttgggtgatagaatgagattttgttttaaataaaaaaaaaaaaaaaaaaaaaggaagaggagggatgggatagagatatagggaagaaggttttgtgataatggggtagagattagagtatgtgatgtttttataatataattaggaatgttaggtgttattagaaggaggaaggtatggatgaggttggtttttagggttttagaaggaaatagtttttgattttggatttttggtttttggaattgtgaaaatatgtttgtgttgttttaagtttttttgtttgtgttaattggttataatagttatttaagagattaaggtgtgagggttttaggaattttagtagggtaaggggttgagggtttatttggtttatagagttatagtttattttttttttaggtttagagaggttgggtgatttgtttagggttatataggtgtttatgaaagagtttgtattaggatttagaatttggtggtttttattttagtttttgtttttttgaatttttttttgtttggggggaggtttggggtggaggtatttgtataggttatttgtttttttatttttttaagggttgaatggggataaggagatttttttttttgggtggggtaaggtagtggatgaggttttatgagtttttggtttaggtgtggtttataggttttgggttagtagaagagattgtttttttatttgtttggagttttggtgtttgtggtgagtatttttgatggtattttatttggttttttttttaaggatttttttgttgttgatttggtatttgtggttattgtttattatagtaaatgggattattttttggggaatgggtagatggtattggttatatatgtgtgggaaggtaatttttttttttgggtttttgggaggagttgttttgagtttggggttttttaaaaatgagagttttagtttgatagtattgggtatagatatttgggtttagtgttttttggttttaagaatataattttatggtttaaggttttttaaatttttaatttattttttagtaggaattgggggttttttgggaataatattttagtggatttatttatttggaattttttgtttattagttggttttttgagtttttattaaattttttttgggggtatatgttgatgttgttggatagtaggtttgtggtgatttgggataaggagggagagagatgggtttatttttgtggtaagttttatttatttattggtgtttgttatatgatttttatattgtgtgttgttttaggtttgggtttaagggtaggttttggggggttgtgatattaattatttttaatttttgtgttttttggagggaagaggggtagttgtaggtgtatttgttgttttgagtgatgttgtaattttttaggggtttaaggttattgttttgagtattttttatttttttttttttgtttattatagttttaagaaagtatttagggttattgagatttttttttttgaaattttttttaaaaaatttttgttatagtttttagttttagtaggggttttgtttgtagtaattttttagttttttgttagtagtttgatatgggtatgtgtaatagaaatattttagtgagtggttgtttgtttgtttaggtatagattatagtttgtgtgtagtttttggtagatatatttattttgtgtggattgtttttttttgtatatgttgggaaggtttttgatatttggttttaggatggagtaggttataggttttatttatatttattgaggtagatgtggtgttgtagtttaggtattttggttttattttgaaaggtattttatgtggttttgatgtgttgttttgttaggaggaagagtttagggttgtttttttgtttggatgtttttttttattttatagtaggggttttagatggtggtggagaagaaggtggtagagattattttttttgaaatttttttttttttttttttttttgagatggagttttgttttgttatttaggttggagtgtagtggtttaattttggtttattgaagtttttgttttttgggtttaagagatttttttgttttagttttttaagtagttgggattataggtgtttgttattatgtttgattaatatttttgtatttttagtagagatggggttttattatgttggttttaaatttttgattttaagtgatttgtttgttttggttttttaaagtgttgggattataggtgtgagttattatatttggtttagttttttttttatttaataaaaattaggtagggtgaggtgaggtggtttatgtttgtaattttagtattttgggaggttgaggtaggaggattttttgagtttaagggttagagattagtttgggtaatatggtaaaattttgtttttattaaaaatataaaaattagttagatatggtggtgtgtgtttgtaattttagttatttggggattgagtttgggaggtggaggttgtagtgagttatgattgtgttattatattgtaattttggtaattgagttagatttttttttaaaaaaaaaaagggggggtataaaataaggtgggttatgttgtatggtttttgtttggttttattttttggaagagagatttattatttgtttggtttaggttttttttaaaattttttttagagattttgttggagaattggtatttttataaagttgtttttgagatatgggggagttggagaggttattttagggatggtttttagtagttatttgggttagggattattaggttagttatttgttggggagagtgattagtggtttggtttttttgatagtgtgatttttttagatggggtggtttttgttaggtttgtagtgtttttaggttgtatagaagggttggggtaagtagagatggaattttatttgttgtttgaagtggatttttttttttagggtgagtgtgtttgttttggtgatgatagggatgatgttgattattttgtttaggtgttttataaatttgatgtttaggggtttgaggttgaagtagagggatgtgtgtgaggtttatttgggggagtggggtagtgggggggtatttatttttaagtaggtgttgatatttttaggtgttggtttggggtttatgggggtttttgttggtaaggatagggttttgggttgagttggttatgttgtgagtgtggggtagaggaaggatatgggtgtgttttagatataggtgatattattgtataggttaggtgggttagggttagttttaagtatttttgtttatgagttttggggttttaattatatttttatatgtttatatagaagggttgttgttggtttagtagttgttttgttgtggggttttggttgggaggggagaggtaagagaaatagaagttagtattagtgtgtggtgtttttgtattaggtgggttgtttttttgtattaggtgggttgttttttttgtttgtttggttttagtgagtttggggtttgatgtggggaaagttgtgggtggtaggggttggtagggttttggaattggggtattattttttttagttttggagttgagttttttttatagtgagaataaattggttatatatatggttggggagaagtttgttttgggtagaagtttaagtagagatggttaaggtttgtttttgttttatgggattggatgttttgggtgggattaggtaatatgtttagttggagttttagttaaagggttagtgttggggagtggtagaagtgttatagattgtttgtttgtttttggtttgtttagttggtattaggagaggtttttgttttttgttattagttttagttgaggtaaagtttggagtagttggaatagttgttataggattgtaggtgagttgttttgtttgggagggtagatgtttagtttaggagaggtttatggatagtgggttggttttttgtttttgatttttgttggtttatagaggatgatgttagagggtgggtttgaaaattttggtttgggtttttttatagattttgggtgaggtttgttgtttattagttaggtttttttttgtatttggtgtttatagagtatggtttttttaaatttttgggttttttttgtttagggaagtatatttgggatagtaggtgtgaaggattttttttatttatttatgtagataagttatttatggttgtttttattagttatttttgttggtttttggtttttttttttttagttttggtttagggtgagttataggtgtttggtagggggtgtatagggagttgaggatagagggtttgtgaggttatgaagagtttatttgttagggtatatgtagttttttgtttttgttgatttttaggggtgatgttaggtgtggatagagttggtgggaggaaagggtttttattaatattaatagtagttttgtttagttttggaaggggttagtattgatttttgtgttttttgtttaagaatgtattaaattttttaaggggttttatgaggtagggtttggatgagaaggttagttattgttatgggtgtttggttgggggtttttattttatttgttagagtttggtttgagaaggtaggatatagattattaggttttagaatagtttagggtttgtttgatttttagttttttaagatgtagttgaaggatgggggttgggtaggatatttgtataggggttagtgtgaggttttggaggtgtagatatggtatatttttaattttatagttggtggttatggtttttgatttagtttttttgtatttagtagtagggtagatagtattgttttgtagttttaggggatagagggaatttagggtatttggtatgaggatgttgatattgtagggatgtatgagtggttggtggtggggatgaagtagaggtagtagtggatgtgggtgtttgggatgtgttttttgtggttgatgttgatttttttttgtaggtattttttgtattggttattgatgaattttatgatgggttgttagttgtgtgggggatggggatgagttagtaggtatatgagatgttttttttaagtaggttgtgtatttttaggatttagagtttaatattttattttttaatgaaatgtatgttttgggaggtttggtttgttgagtggagatgttatagttttatttttggttttttaaattagtttttttgggttggttttaggtgatgagttggggatagtaagattttttaggtaattttgttttggtttagaatttttaggtttttgagatgtgtggttttggtagtatgttaggttttaggaggtgggttttgtatttttgtgggttgggaaatttttagggttgattttgggtggggtttagggagttttgaagtttttgttagtgtttttttttttggaggggttttattagtttttgttgttgatgtggtttttgaattttggtgtgttaattattgttagttttatttggatgtttttttttttaatatttgtatagagttatggatgtagagttagaggggagatggaagatttttatagatattttatatttgattgattttggggtaattttaggtaggtagtgatgataattaaggagatattgggaaattaatggttttttttagttaattttggtataggttggtgatggtttttttgggagttttttgtttgttagatttttggtggaaaatttagttgtttgtggggagtttagtgtgatggggtttataggggtttgggatattgatttattatagttagagttttaatatgtttaatatgttggggatggtgggtatagtgagtttttgttttggggatttgggattgtttgatttgggtatttttatattgtattagtgttttaggaaggtatgggtattttatatttttagtttatttttagttattgattgtgtgtgatggttttgatttttaatttttgtgttttaggaaggtaggggtgttttgtatttttagtttatttttggttattgattgtgtgtgatggttttgattttttattttgtgttttaggaaggtagaggagttttgtatttttagtttgtttttggttattgattgtgtgtgatggttttgatttttaatttttgtgttttaggaaggtaggggtgttttgtatttttagtttatttttggttattgattgtgtgtgatggatttgattttgatggttttggggatgtgtttttttgaggtgggttgtattgatttttggttgattttggatttgaagagggtgttgattaaggtggatttatttaagttgttttgttttggggagaggatgggaggttggttaggggtttttttggagagattagtagggtttgtatatggggttttttttatttaggtatgaggttttttagtttgagatttagtagtgtttgggttattttttggtaatatttttgttaagtagtttttgaggattttatttttgagttgggtgtttagtgattgtgtaaatttatatagttgggttttgatgttagtataatttaggttatagtttttttttgagaggtgagttgggtttgggagagttggtattttttgtgttttttgtgttttttggataggaggttttttggtggtttagattttggataggatagaggttgggttggtggaggagtttagggttgtttagggtgtattaggtggttgggatttttgtagtttattagggtggttgtaattaaagtttaggtgtttaaattgtttttttttgattggttagggtttgggtaagttatttgattttattgtgttttagttttttgatttgtaaaatgggataaatagttttttttttgtggagttggtgtgagtattaggtaggtttatgtatgttttatggggtttgtggggttatgtgttagggggtgttggtttgtagggtggtgttatttgagggatagtgattgtgtgtgtagatagttagtttataggtgattgagataaatgaggatgaggaagtagtatttatatgtaatataatatatataatttatatatattttatatatatattttataatatatatattttatatgtataatttataatatatatataatttattttaaatatattttttatatatattttatatataatttttataatatatataaataaattatatataatatgtgtgtgtgtgtgtgtatatatatatatatatatatatatatatatatatttttttagatttggagttttattgttttattttgtatagagttgttttgggttatgttagtaatatattaaaaaaaatattttaggttaggtgtggtggtttatgtttgtagttttagtattttgggaggttgaggtaggaggattgtttgagtttaggagtttaagattagtttgggtaatatagagagattttgtttttatattaaaatgtaaatattggttaggtgtagtggtgagtatttatagttttagttatgtaggaggttgaagtaggagaattgtttaagtttaggagtgtgaggttgtagtgagttaggattattgttattttagagtgatagagattttgttttttaaaaaaataaaaattggttaggtgagatggtttatgtttgtaattttagtattttgggaggttgaggagggtggattatttgaggttaggagtttgagattagtttggttaatatggtgaaattttgtttttattaaaaaatataaaaattagttaggtatggtggtatatgtttgaggtatgagaattatttgaatttaggatgtggaggttgtagtgagttaagattatgttattgtattttagtttgggtaataatgagattttgttttaaaaaaatataatataaaaaatattttaaattatattgatgttttgattttgataatatttttttaggaaaagtgtgggtttttgggaggatagaggttggtgttgggaatttttggtttgaattgtttagtagtttaaggatggatattttttgtttatttttttttgtttattaggtttgtgttttggttaattttaggttaggagttatgttaatgttttagttatgatattttagatttaggagatgttaattgggatattgtaaggtgtatttttttattattgttatttttattattattattattattattattatttttattattattattatttttattagtattattattataatattattattgttattattattattttattatttttgttattattattatttttgttatttttattattattattattgttattataattattagtattagtattattattaattatattattattattattttattattattattattaatattattattatttttattattattattattattattaatattattatttttattaatattattattatttatattattattataattattattattataattattattattattttttttattattattataattattattattattattattattataattattattatttatattattattattatttttattataattattattattatttatattattattattatttatattattataattattattattatttttttattattattattattattattattataattattattattattttttttattattattataattattattattattttttttattattattataattattattattattttttttattattataattattagtattatttttattattattattataattattattattattattattattattattattattataattataattattataattattattatttatattattattattataattattattgttattattattataattattattattatttatattattattattataattattattattatttatattattattattataattattattattattattataattattattattatttatattattattattataattattattattatttatattattattattataattattattattatttttattataattattattattatttttattattattattattattattattataattattattattataattattattattataattattattattattattattattattattattattataattattattattattattattataattattattattattattattattattattattattataattattattattattattattattattattattatttatattattattattattttattattgttattattattattattattatttttattatttttatgattattattattattatttttattattattattattattattataattattattatttatattattattattattttattattattattattattattattattatttttattatttttattagtattattattttattattattattgttattattatttttattatttttattattataattattattattattgttgtaaatttttgaataattataatttgttggggattttgtttggggtttagtttgtttgattttattttatgggatgattttattttatggatgaggaagttaaggtttatagaggaggagtttaggggaagatatataagttttattttgttgagttaggataaagttgggattttttttggggtttgtggatttttaaataggtgtttttttattttgtttgtatttttgtaggtgggtatagttgttatgggagggaggagggaggagagtagagttgttttatgttttgttttttatttggtatttttgggagggagtgattttgtggggaattaggattattgttttttttagggttgaaagggtgaagaggtttagataggtgaagtggttttttgtgtattatttttagagggtaaggttgttatagtggtagttatggaaggtgagggttgttgggttgtttttttttttttttggggttaaagttttggaagaaggtttgtgttatggttgggatgtagaggtttttaggttttttttattttgtttttggttagggagtagggtagtttttttgtagtttatagagatgagttttagtttggttattgtttttgggttttttttttttttttttttttagttatttttttgggaggtagttttgaatttttagggtataagtatgttttttataataggtagaatagggtgggggttgtaggaggggattttatatttttgtttttttttgaagtaggttgttagtttttaggtagttgtgagtatagtagggttatgagtagttgggttttatgaggttataggaagtagagaggatattaagattttaggggagttagggtttagattagtgtagaagaggaaagaaaggtgttgggttggtaggtgtgggtttgtgtttatagagttgggtaggaaggatgtgtatggttggtaaaggttagagaaataggtttggtttgagaggtgtttagatattttgtagaaattttgtaagtttatttttgtttagggtgtgatttggtgggggtatttttttagatttttttttggattttgtggagtgggtagaatatagttttgggagttaaaatggtggttgtggttttttgttttgtgagttaaggaattttggtagttttttttgagttttgtttttgtttggaaaatgggatgttttttttatagggtttttgtgaggtttgaatgggatttggggggttttggaaataataggtggtttattgtagattttagtttggtttttttattttgtttaggttgtgttgattgatgattttttgtggtgatttttagttttttggggttattagggggtgtggaagttatgaggttttaattttagggtagagttgaagttgagttgttgggaagtttttggttggggtgtggtggggtgtggtggggagtttggagggttaggttggagtaatagtgaggggatagttgttatagaattttttgtataagttgatgttattgtttagaggtagtgattatttattaggatttgttttaggttggtttgggttttttaaagttattttaggggttttggatgtgtaggataggtttttttgaggagttgttggaggttgtgggttttttttaggtgtatgtatgtatatgtaatgttattggtaatttgtttttgaggttagggttgttgttttattttatagaagggaagattaagtttaaaggtttgtgggttgttttgggggttgaggttggtttttggtattggttgagtggtatgtaaggtgaggatttattgattattatgatgttgaatttgaagttttgttttatggttttttggtgtatttgttttaggatggagttaatttttatgtagttgaagtttattggggtttttttgttttgtgatgtaggtgtttgtttgagtttggtatttttgggggtgttggttatgttgttaatgtagttgggagttgttttagtggttggggaaggaatagtagaggagttagagtggaataggggtttatatataggtgtttgttaggtggttgttatatttatttttggatggggaaattgaggtattgaggtttagaaaggttaagtgatttgtttaggtgatttttgagaatttttttgggtggatgtttttggttgtggtgttttttaaaaagttgttattttgtagttatgttgtttttttagtaaagttttatttttagatttttaaggttaggtttttttatttttttttttaggagttgtgttaagttgggggttttttgtgttttaaggtagggttgattttgaatttttgtttttgtattttggagggttgtttagataagggtggagggtgttttttttttttggttttttatattgttttgggttatttaggtggatttggtttttttttttatttttatttagataagttgtattgtttgttgttatttaaaggttttagaagttgatttatgagttaagatataggagggatggttttgtaagaaatggggatagaattagtgtgtgtttttgttttttatatttttatggatggttttgtaagaaagggggatagaattagtgttggtttttatggagttgtgtgtttaattttatagaatgagttagtagttttgggagaaggaaaagtgttgggtgtagggtgggtgtttggatgtagagttgtttttgggtttatggaggaggggggtttttgtattatatttgtttttttttggattgatttaggtggttgttttgtgtgtttggttagtgtttatgggttgtatatttataggttaagattaagttttatttttgggtatgtggggtatgtggagttgaattttttgaaattattaaagttttttttgtttgtaggtttttttgatggttttgtttttggttgttgttaagatattatatatgggttagaggtttggggttgggggtggatgtttggaagatgtttgttgaggatttaggtgtttttatatagtggggttttaggggtatttaggatggggttggtttttattagggttggttggtatatgggttaggttttagtatattttagatttgttatatttattggtgtatgtgtatgtaggtgtagataatttgttggttatagaggtggtgtttttgttagtttttataggttggagttgtttttggtggtttttagtttttatgtaggttgggtggttgttgttttgtgtttttgtttttgtttgggtttatttaggttttgttttgtttgtggggagatttttgttttattttgttttttagggaggatttggttttaggtattttgtgttaagatagggattatatggtatgtttttaggtagggttttttttgttagttttttgggaggggagtggtttttttttgggattggtgggtatttagtaggggtagttataggggagtggagttggtgtgggagttagggttatagtatgggaggttgtagggggtttattttttgtgataggtaagtgagtagtttttttagataggaggtagtttttttggtttatgtttattttttattttgtttagaaggtgggaggtaggtttttaggttaggaggggtagtgggagattttagtttaattgtttttttatttgtggggtaagaattgaatttaggaaatgtttattgagttttttggttgtagtttgtatttttagttgatttaagttattttttttggtttattttattggagtggttagagggtgttggagggaggttttttaggtttgaggtattagaggtgagagaggaaaagattttggaagttagaaattgggggttggtttatttttataggtatttttttgtttttttagtttttatagggtataggaatttttattttatggaattgggggaataaaggaataatataattttttgttgggaaatgttaagggggggtttatatatttttattgttgagagtaatatttataggtggatttggaggttagggtttttttttttgtgtttttatgtggtttttatttaggttatgtagtttggaagtttttagggttttgtttttgtttttgttttttttttagaaatatttttttttgggtttttaggatttttaaataaataaagatatagttttgtatttggttatggattatgtggttttggggttgttttttgaagttagatatggggttttgttttgtggggtagtagtttagtttttatttatgtgattgaaaattgtttttatttgtttgtgggtttgagagttattttgtttgggattgggattagtttttatttgtttttatttttttttagtattttttaattttttttagtaggatttggggggaggtgttgttttttgaattttttttttttgtttttaatgtttttggagtttagagtgagggaggggttggtttagttgtagttgggtttttttataggtattagtatttattgtagaaatttaaattaaattaaatattttgtttattaggggttttgtttgagaaataataatataatgtagttgagttttatttttgttattgatgtagggtagtggtttgttttttgtataggtgagagttatttttgtaattttttttttgagaggtggttttgtaggttttggttggtttgtaggtaggtatgtatgtagagagtaatgtaagagtttgttttgtttttttatttggttaggtgagttttggggtttgtttttaggatttttaagtgggaaaagtagagatttttatatttagagatatttttattttggttttaggatattatggtgtttagatagttggaaataatggtaaagattatttattttattgtttgtgattatgatattgtttgaggtttgtgttgtttagtgtggtagttattggttatgtgatttttttttttaattgttataatgtttgttatggttattattttgaagtgtgtagtttagtggtgttaagtatatttgtattgttgtgtaataaatttttagaatttttttattttgtaaaataaattgtttttattaaataattttttagttttattttttaagtttttggtaatttttattttgttgtttttttgaatttgattattttatggatttggtataagtggaattttataggattgtttttttgtgattaaattattttatttagtgtaatatttgaaaggtttatttttgttgttgtaggtattttaattttttttttatggttgagttaaattttttgtatgttttattttttttttttttttttttagatagagttttgtttttgttgtttaggttggagtgtaatggtgtgattttggtttattgaaatttttgtttttttaggtttaagtaatttttttgttttagttttttaagtagttgggattataggtatttgttattatgtttggttaattttgttttagtagagatggggtttttttatgttggttaggttggttttgaatttgtgattttagatgatttatttgttttggttttttaaagtgttgagattataggtgtgagttattatgtttggtttgttttgtttttgatttttttatttatttgattgtgggtatttgggttgtttttatttgttggttattgtgaatagagttgttatgaatgtgggtgtataaatatttttagttttttaagatgttgtgtatttttttgaatttatatttagaagtggaattatgggatgttatggtggttttagtttttgttttttgaggaattgttatagtgtgtttataagtgatttttgagtatttgatattgagttagtttaattgaggaatggaatttttatttttatttaaatttaaatagttatattttataaatggtaattatattggatggtatagaattttagtttaatttattttttattaatggggaaattgaggtttatagagtgatttttttttttgaaatgttattgtaagtggttaggttagtataagatttttattgaatttggtaattttgaaattttatatttttgtttgtatgatatgtggttaatatttgtgattttttttaaagattgtgggttttagtaagatggtagttgttttgttgagatttttattgtatttttaggttttgttttgttatgaatatggttgtgtaaggatttgtttgggtttttgttttttatttttttgggtatttagattaattattagtagtatttatgttgatttttagaaaggttttgatttggatagtaattgatatgttattttatagttaaagtaaaatgtagagttttttttttggttttgtagttgggagttagaggttttaggttttggtttttggtttaaagtgattttttgtaagtttttttagtttggtaaataggttatgtattttttgattttttttttagtttttgttttgtgagtttttgggtgtttgaggttgtggtttatttagtgatatttttagtttttagtgtagtttgtgagtagtataatatatttggttttagaaataattaatatatttgttaatagatgtgtggagaaatttaatgtgttgagttaatatagtggattattttttagttataaaaaggtatgagtgtgtgttaatatagatgaattttgaaaatattttaattgtaagaaattaagtataaaaagttatattttttagggttttagttatatgtttagaataagtatatttgtagggataaagtgtagattggtgatttttaggggttgggggagggggagtgattgtgtattgaggatggtgtttttttttggggtgaggaaaatgttttggaattagaggtgatgtttatagaaggttgtgaaaaaatgttatttaattgtgttttttgaattggtggatggtgtaatatggaaattatatttttatgaggatgggagaggaagggaaagaagggaaggagggagggggaaggaaatagggaaggaaggaaaaaagggaggggaggagggagggatggaagaagggaaagaaggtagttatttttagtggagttggattgaagagtttaatgggtgtagtaaattattatggtatttgtatttttatgtaataaatttgtatgttttgtatatgtattttagaatgtaaagtaaaataaaataaagagtttagtgttttttataagtgtttaggagttagttttatagtttagaggatagttgaggtttagaggttaatatttaggtttgaggtttttaagttggtgttgttagattatgttttagataaatttttttatttttttgtagtaagggtgtttttagggtggtagttaggtggaggtgttaggtggtgggagattttgatagtttttttgtaggtttttattttgaatttaggttttatgttagggtttttttgttatttattggtgttggtggtagtaggttattggttttgtgatggggattgtttttaaatttgtttattttggggattagtttttttttttttgtaggtgtttattgggttattttttttttagagttgtaggtgggtttaaggtagggatgaaagggttgtaatttatgtagttttgagttagtattttttgggaatatttgtatttagtgataaatttttattttaattttaggatttgttgaggatgagggaattagattgttgtttgtggttgggatgggggttgtaggatatttggttgggaggtagtgtttagagaggaggtagttattggatatgatatattttaggggtatttatatttattatagttttagggttgattttggtttatttggtttggtgttgagagagggtttgatatagtaggtttgtaaagtttgatttggaaattaagatttaggggttgtttttttttgtttatttttttttgtgtgttatgttgtttggtttatgttttagaaatgtttatataagttttattagttttgttggttaaatgtagagatggtgttgttggggtaagggattttgagttattgtttaatgttatttttagttttaggggagtgatagttgggtttgtattttaggataaagtgtttagggttaagttaatgttatttttttgttttttttaaatttaatttatatttggtttttagagtatggattgaaatggttatatttttatatattttgtttgttattgttaatggtggttaagtagaatgtaaggttattttttttttgtttatggaggtttgtgaagttattgattaggttatggtaggggagttggtggtatttattatattttgttagttttttaggtttgtgtttaggagaaagttgttggtatttatagttggtgtttttgttttggtgaagatttttttgtttttatttattttggtttagtgtgggtttagtagtttttttattttgttttgtaataatgtatattggagtagtttttagttgttttttttttgtaggtttttttgaatttagattttggggttagtatttttgtggtagttttatggttatttgtaggtttttttagaaatttgagtttatgggggtattttaggttttataaattaatagatgttttttgttttttataaaggggttttttaaagttgagtgagtttttgatgtaggtaatgttaggaggatagtgtttggttagggttgtttttttttttttttttatttttttgggtgtttgtaaagttttttagatttttgttgaattttggggaagttttgttttgtaattagggtttgttttttttgtttttatatagagtttgttttttgtgtttagatagtttttttatgatggtaattgaataatgatgtgtgtggtttttttttattataatttttttatatagggtttgtgaagttagatattttatttattatgtttattttagtttggttttttttagagtagtgtagggtttatggtaagttttggtaaaaagtttggtgaatgaatgaataaatgaagaaataaagtttattatagtagttgaggtttattgggggttttttgtgttaggtgttattttaatttttttttttagagagtgggttttattaatgttggttaggttggttttaaatttttggttttaagtgatttttttattttggttttttaaagtgttgggattatagatataagttattgtattgagttttaggtgttattttaaatgttgtttaggagttattataattgatggattattatataattttataaggtagttattgttattgttttattttatagataaggaaattgagattgagagggtttttgttaattatgagggttgtaaagtgagtaagtggtagagttaggatttgaagttaggtaggtgagttttaggttgttgattttttttttaggttaggtttttgggaattatggaaaggttggagaagtatggggtttttgtagttaggatttagaaggtgtagttgtggtgtaggtagtttagtattgaggttttggtttttagttttttttttagttgtttttttttagggagttggaggtagagttttgaattgttaggagaagattttatttgttagttagggaaagttgttagggttttttttagggtttagagttattttaggtttattaaagtatattagtattttagtttttataattttttttgtaagaaagatgatggtattagttattgggttgggttgggggttttagattttaggggtttttttaggtttgtttatggtttttttaggatatagatgtttatttgagaaattttagtgtattaggggttttatagttaaaataaagaggtagagttgttttggggtttttgttaaagtttttaggtagatttatttagtagatattaaaatgtttattttttatttgaaaattttatttttaggaggttgttttaggttgggttgataaaatttatagagattttaatgatgattttttattttaggtatgagtgagtgggtggagggagaagttattgttaattattaatagtttaggaaatgtaggtaaaggaaagagaatggtaaggtgatagggttggaaattagatatatgtgtagaggtgagtagattttagagaaagaattgttttggaataagatggtaaagaaattatagataataatggtagatgatgattttggggttttagtggattaggattataatattgatttatttgataagtatttattgagtgtttattttatagtaataaaaagatgatattataggtttgagagtagttagaatgaaaatagtggtggtatatgggaatttgaagtttatttatttaaatgtttattagttgagatttttggatagatttgaagtagtttttaatatgtaaggaatttataatttgatatagtagtataggatatgtgtgtgttataaatttttggtgaaaagtaaagattttttttagaaaagtatatattgaagatagatagatagatatatatgtattttgaatggtttattaaagaatttttaggtttgtggattttagttaaaaaaataatttggtattttgggaggttgaggtgggaggattgtttgagtttaggagtttaagattagtttgggtaatgtagtgagattttatttttataaaatgaaataaaataaaatgagaattaaaaaaaataaataaatttggtgtgatgagaatttatagaatttaatagggttattttagtattatttgtagtattttttaaatttttgattatatatataaagttttgggttttatagttagagaagagggagagtaggttaaaaataattatttaaggtggaagatgagtttgagaaataaagaggtaagaggagaagattgaggttagttgttttttatttttgagttttggtaggaggaagtttttaagtgagaataagttgttgtttgtggagtggattttagagtgggtggatagagatgataaggaatgttatttttggggggttttgaaaataggatatttttttattttaattttgttttttattgtattgtgtttttattgatttatttaagttattataaatattttataaatgttattggggattttttgtttttttttaaagatggaaatattgaatataaatgattaaattgtgtaaatgtgtgtgggtgggggattaaggattgaatttttaaaatgtatatagtttatttaatttgttaattaattttaaattaaattatattttatattttgtatgggataggaagtgtttttttaaagtttggttaggatttgggatgttggaaatttgagattttgttttttttttttgagatattttgaaattttgtttagaaattgagtataatggttttggttttttagagaaagatatggatttgtaaaggtaaagagttgtatttttttttgagttggagttttttttggtttttattatggggtttaaataaaattgtagttttatagtttttttgttggtgtttttttttttttggtgattaataaggtggaagagttaataagaattttgtgtgtttttttgtaggatttggaagggataggtggtgtgagtttgtttttatttagtttttttttttatttatttaggggttgaggtgtttttgaggtagggggtgggggtttttatttttattgttggttaaggtttttttagttttttttttgttaaatttttttaagtaaattttttttttattgtggaggaaggaattttaagtagttttgtttttttgttagtatggttttaattggttttagttggtaaagttaaatttggataaggtttaagggttttttatattatttgttgttttttggaagaggtttttttttgtttttttatttgtaatttattatttttttagtttgagtttttttatttaggttttgtggtttattgagatattaattttgggttagagtaagttttgatttgtaaattattattatttattttttaaagagttatttttagaatttaggttgtagggagggtaggttaaggatgaattttttgatttttggtgtggtgtgtggtggggggggttattttatattttgttttttgttgtttttttgttttgttttaggttttgaagtggatttattgtagagggagggttagggaatggttttgatgttttttttattttaaggaattttttagtaggagtggtttttattttaaagtaattttaagatttagtttgtgttagttttttagttatgtttatagtggtttgttaattagagatttttttagtttttggtaaatttgtaaatttataaagagaaagaaaagtttttttgtgggtgggtggatattggttatttgttataggttggaatttttttttattagggatgttttttaagtaggggttggggagggtagggtttagagtttttttttttttagttttttttgttattagtagatttgttagtagatatatagtagagtttagtagtgaggtaataataggggttgtgggggttggggttttgttttttttaatttatgaaattatttgaaataataaaatttagataagggtttttggggtgtaatagggtggttttttgttaggtgttgggtagaaaaaaagtttttttttaatttttttttgttgtgtagattagtttgggttttggggatgttgtagaggttgttttatgtttaggttttttagagatagtagggggttggaggtatggtttgtttgggggtaggggataggtagggaggggtatatttttgggttatgagtaggagtttgattaaatgatttttttaggagggagaaagatattgtatataattgtttgattatagttagaggggttggaaaggtgggggaaaggggtgaaggggttaattgttttaggtgtttttaatttatgtagtatttatttggattgataagagttgagagattggaattgttttttttttttgtttttaggttttgttttaggagtttttttgtttaggagtttgggagttgaggaggtttggaagtagtgggtttatagtgttattgttttgggaatttatagtgttttggatgtggtttttttggttttagttttgtaggtagtttatttggattgtatttattttttagaagagttgtttagaattttgtatgtttgaaagaaagattaattaaagaagtgaggaagttaaagagaggtttatgaaagtttatgatgtattttttaagtgtatattttagtaattttaaatgttttttgaagtaaggatggggatggatggttggataaatggatgggtgtatgggtgtgtgaatgggtgagtgggtgggtggatggatggatagatggatgaatggatgggtaggtggatgaataggtaggtgaatggatgggttggtggatgaatgagtaaatggatgaatgattggatggatgggtggatgagtagataggtggatgagtgaattggtggatgagtggatagatggatgagtggatgagtagatgagtgaatgggtggatgagtggatgggtgggtgagtggatgagtagataagtggatgggtggatgagtggatgggtagatggatgggtgagtggatgtgtggatgagtggatggatggatgagtggatggatggataagtggatgggtagatgagtggatggatagatgagaggatgggtagatggatgggtgagtggatgggtgggtgagtagatgggtggataagtggatggatagatgagtggatgggtggatgagtggatggatatatgggtggatagatgggtgagtggatggatgatgagtggatgggtggatgagtggatggttgagtggatggataaatgggtgaatgagtggatgggtagatgagtggatggatagatgagtgaatgagtggatgggtggatgagtggatggatagatgggtgaatgagtggatgggtggatgagtgaatgagtgaatgagtggataggtggatgagtggatgggtggatgagtgtatagatagatgggtggatgggtggatgagtggatgggtgggtgagtggatgggtaggtggatgagtggatggatagatgggtaaatgagtggatgggtggatgagtgaatgattgtagataggtggatgagtggatgggtgaatgagtggatagatgggttgataggtggatgagtggatgggtggatgggtgggtgtgtggatgggtgagtgagtggatgggtgggtgggtggtaagatgggtggataggtatatggagtttatttaaggagttttagaaatatatatatatttttttattttagattttttttaggaaaaagtagtgtgtatggattgttatttggttatattttgagatagttatttttattttttttggaatattgtttggggggatgtagtatagggtatttaagtaatttttgagtttagggtagagatattaggaagtagtaggtaggttgtgattttgtaggtttgttttatggtttttgttgtttgtattatggtatgaagtttagatgtatttttggatttggggttttgattagatggagttattaattttttgaagaatgaaatatataggggttatttttgttttttagttgtagggaatgatgattatttagttttttttttttttaaattttttttaggtttttgtgtatggttttgttgattttttttttgtttttggttatttttttagtttttgttgtttttttttttgtttttatttatggagttagttttggtgttttgagagtttttttttttagttgattttatttagtttttgagtatttaatgttaataatgttattttttttgtttagatttatatttgagtgttagtttgatttatagatgtgtttttgggttttgttgtgttaggttttttgttgggttttgggtatttgtagttattgttattgttaagttttaatatttgaaggtattttgaatttaatgattgtgttttaggttgaattttggagtttttattttatttgttttttattttattttttatttaagtgaatagtttttttagttaatagttattgtagttagatttttaggggttgggtttgggttttttatttttattattttgaatttatttatttattttaaatttttattaatgttaatttaatatattttatagttattattattagttgtttttgtttgaattttttttttttaaagtattagggggtgtgtgtaaaatttattaatttgatgatttttttttatgaagttgtgattggtttttattgtatttgggatatattagatttttgtggttttagaattttgtttattattgatgtgttgtgtgattttgagtaagtaatttaattattttgtgttttaatgtttttatatgtgaaatgggataataatatttgttttataagaatgttggggattaaatgagatatttatttatgaagtatatagtgttgtgtttggttagtaaatgtttgaagtttttgttaataaaatatatgtttttaatttattttttagtttttatttatgtatagtttttttggttgttttttagtttttttaataaggttatttatagaggttttttttgttgggattattttttttttatgttgtttttagaatttttatttgtttttttgggatagtttatttatattgggttttttagtttttgttttgttttgttttgttttgttttttttgagatggagttttattttgttgtttaggttggagtgtagtggtattatttgggtttattgtaagttttgttttttgggtttatgttatttttttgttttagttttttgagtagttgggattataggtgtttgttattatgtttggttaattttttatatttttagtagaaatggggttttattgtgttagttaggatggttttgattttttgattttgtaatttgtttgtttttgttttttaaagtgttgagattataggtttgagatattatgtttagtttaggttttttagtttttatatatgtggttttttgattgttgtttggggtttgttgtatttattatttataaaattttatatgtttgaagtatttagtaagatgttgtgaatgagtgaatgaataaatgaatgaatggttagtttgttgtttttttgtttggttttttgttttttttagattagtatgggggtagttatggtttttgtttattttggtaatattgttttttttgtgttggttgtgttggttagagtttttttttatggtgtttttgtggttttggtgtgtggttgtttgtgaatgagatttatgatttttggtttttattatttttttggagttataaagtattaaggtggaaggatggatgggttttttgggatagttggggtgggaggttggtttaggaaattttttttaggaaatggttagtgtgggatgaggtgtttggtgggaggggagtggagtggggatttggggtttggttgttttgtagttagggattttaatttttatttttttttttgtttattttttaattttagtgttgggtttagggtttttggggttttttttaggaatatagaagatatagtaaggattagggatataggataggtagagtttatgggtaggaggtttttagttagtatatttgagtttatgtttggttttaattagatattgagattttggttaggttattttttatgttgaggtaggggggttttttagaggttattggtttttaagtattgtgtggaagatatgttatggagagttagtattttttgagatattagtagaaggttagatgttttgtggtttaaggatgatttggttttagtgtttatttatttgttgttttgtatgaaaagtttgatgtgatatggttggttttagtggaagagtgatttgggaattggtagagtggatttagtaattggtaaattggatttagtaattgagatattgttaggggtttggtagaagttttttaatgtattagatttagttttgatttttatagagtttagttgagtattaaaaggtgtagaggttgagttgagtattaggggaatattgattttagggttgattggtgttgtgtgtgtattttatagtttatagatggtttatatttatttgattgtatttgatttttttttgtgaggttttttttagattttttgttttttaaagttattagttgtgttttttgaaattagagtaaagtaataaaattgtagtaatagtgtgtttttatgaatgttgtgatgttagttggttaaatgagggagtttttagggttttttatattgttttgattttgtgtgttttttggttttggtttattttttatattttttgtttttttttttttttttttttttgaggatttagggtttggggttgatttattgtgggattttaatggtgattttttggaagaaatgtttgttttttttttttatttagtagtgatttttggtttgtttatgtttatgtagttaatataggtagtagttggaatttggaagtttttggggtgggagtttgtttttttttaggtttttttagtttgaattttgggaaggagttatatttatatggtaattttttttaaggttgggagggggaaggggtttggtttgggtttgattatttttttgaggttgtgtttattgggttttttaagttagttgggttttttggttgtatttttgagggatggtaatagattatagtgtaaattgtttattggttggttgggtagtgggtgtttagatgtgggttagggtttttgttttataggttgtgtggtggtttaaagtgggtatttttatgggtatatatttgtgttatagtttatttgtgtgtgtgtgtgtgtgtgtgtgtgtgtgtgtgtgtgtgtgtgtgtgtgtgtgatagtttagaaatatggtaatttatagtttttttaagatgttggttttgggagatttgtttatttgggggttttagtatttttagttttttttaggaaggttttgttttttttggtttgaagttggttttagggaagaatttttttagaaaaataaaagttattttttttagttttagtttagtttttttttaggggtgagttatattaaatttattttttttttttttttttatttttttttttatgttgtaattagttgtaagtggtttatttatttaggtttgttagtttattatagaaaagatatttgaattttgtattttttttttttgatttgttttgggttttaataggtaaaggaaattggaagttagtagttaggatttagttgtaggtttttggggttattttgtgtttttattttagttttatttatttttgtgttgatttaatgtttatttattttagtttatggagtgaggtttggatttaagataaaataaagggggttttggttttttggggtttatagtgtttggtgttggtgagataattttagagtatagtatagagaaatggttgtgatatggatttgtagtatttggttggttaagtatagtaatgtatttttattaggtttgggttttttagtagatatatggtttaaaggttggttggttaaattatatgattttgtaattatttaagagaaatgaaaatatgtttatataaaaatttgtagattagtatttattgtagaattttttataatagaattatgttaaaaagtagaaataatttaaatgtttattagtagatgaagagatatatagtgtggtttatttatgatggaatattatttggttatgaaaaagaatgaagtattagtatttgttataatgtggatgagttttgaaaatattttattaagtgaaaggagttagatattaaggttatatattgtatgattttatttatataaattatttagaataggtgaatttatagagatgaaggtagatgagtggtggttaggggttgagagtttggagttgggaatggggattggttaatgggggtagggttttttttggggatgatgaaatgtgttgggattaatggtgatggttgtgtaattgtgatggttaattttttgtgttagttgggtgtagtggtttatgtttgtaattttagtattttgggaggttgaggtgggtggattatgaggttaggagattgagattatggtgaaattttatttttattaaaaatataaaaaaaaaaattagttgggtgtggtggtgggtatttgtagttttagttatttgggaggttgaggtaggagaatggtgtgaatttgggaggtgaagtttgtagtgagttaagattgtgttattgtattttagtttgggtgatagagtgagattttgttttaaaaaaaaaaaaaaaaatttttgtgttaattggattgggttatggggtatttaggtaattggttaaatattattttgagtgtgtttgtgaaggtgtttttggatgagtttaatatttaatttttttattttttagaaagtttagtttattgttagtatttatttaattttatataaatatgttttttgaggttgaagtaaatttgattggatgttttgtgtgaaaattaaatataaaaattggttaggtgtggtggtttatgtttgtaattttagtgttttgggaagttgatatgggttaattatttgaggttaggggtttgagattagtttggttaatttggtgaaatattgtttttattaaaaatataaaaaattagttatgtgtggtggtaggtattttgtaattttagttaaatttaggaggttaagattggagaattatttgaatttaggaggtagaggttgtagtaagttgagattgtgttattgtattttagtttgggtaatagagagagtttgttttaaaaaataaaaaaattaaaaagaaaaaaaattttttaaattgtttttgtagttatttttaagtaaaataatagagttatttgagttgtttattttggaaaaattagatttattaaatgaatttttagttaataattgattaagaataatgttaatattatttgtaggaatgttgtgttttttaggatttgatatttttagtgattgagaattattatttttttttaaattttatttatttatttattttttgagatggaattttgttttgttgtttaggttggaatgtaatggtgtgattttggtttattgtaatttttgttttttgggtttaagtaattttttggttttggttttttaagtagttgggattataggtgtttattattatgtttggttaatttttgtatttttagtagagatgggattttattatgttggttaggttggtttttaatttttggttttaggtgattagtttgttttagtttttttaagtgttaggattataggtatgagttattatatttagttgagaattattatttttttttaaaggaaatattattattaaaaatggaatgttataaatagaatgatgttttttgtttttaaagttgatatattagagtgatgtgaaaataataataaaagtaagatattttttggtaaatttattttggggtgaatgttgtagttataagtattgttggtgagtatttttggggtaaataggaaaagggtgtaattaggagtttgggtaaagtagattgtgtgttttgatgggggtgggttttatttgattagttgaaggtaatagggtttggaatgtatattttaagatatagtgttttggtatagtaaatatttttagttgaaggaatttaagaaatggtaggtttaagaagaatttattgatttgttttttttttgaagtagattataagttttttatgtaagaggtgttttttttatatttagtggaaaggaatagttttatttttagagatagaggatttgagaggggttttagtatataggttttgttgagatttttatgggtttattgtttagtttattttttgttgttttgttatagttttttatgattttttattttttattaaatttagtataaaaatgtttaggtttaggttaggtatagtagtttatatttataattttagtattttggaaggttaaggtggttagattatttgaggttaggagttgaagaatagtttggttaatatggtaaaattttatttttattaaaaatataaaaattagttgggtgtggtggtatatgtttgtagttgtagttatttgggaggttgaggtatgagaatggtttgaatttaggagatagaggttgtagtgagtagagattatgttattgtattttagtttgggtaaaagataagtaaaagaaataaataaaaaaattgtttaaaataagtaataaataaatttaaaaaataagtaaaataaataaaaattgtttaggtttaggttgggtatagtggtttatatttgtaattttagtattttgggaggttaaggtaggaggattgtttgagtttaggagtttgagattagtttgggtaatatagtgggattttgtttttataaaaaataaaaaattagttaggtggggtggtatatgtttgtagttttagttatttgggagtttgagttgggatttaagagtgggtttagagtagtttttggggttggtagttgggttttagtttgagtttaggaagttaaggttgtagtgagttgtgattgggttattgttttttagtttggatgtgtgatagagtgagattttgttttaaaataaaataaaaattgtttaggttaatggtttttttgggtttttatttttttatgaaggtttggtgttaagtaaaatttatttgaattgttatgtttgttttttgttaatttttgttagtttaatttttagggttttagttaatgaatttaaaattgatagaaggaaagggtttttttttagattttgttttgattaggtttttgtaattttgtgataaaggtttgaaggtttgaataggaggatataaggtttgagtgagagagaattttttttgtttaattgtttttaatttggaatattagattttttttgttttagatttaaattgatatatgtgttttttttgggttttgggattggaatgatgttattggtttttttgggttttgggtttttaggtggatattagagttgtaatatgggtttttttgtgtttttagtttgttgatttattttgttaattttggtatttgttaatttttgtaatgaggtgagttaattttttataataataaatttttttatttaaatatatgtatatattttttattggttttgtttttttggatgattttaatataattattttgtgaatatagtaaaattattgaattgtagattttaaaaaggttaatgttatagtatgtgaattttatttttataaagttattatttaaatagtaataagaagttggtgagttttgtgtatttttttgtaaataagagtagggatagtgttgtttttgtttttggatgtttttagtttttagtttgagtttaggaatattttttatgtgtttttttttttaattttgtagtttaagggtgggggtggtttttagtttggtattttttttgtagttttttattttttttttatattagttaatggatatagaggtttttttatggatttttatttttatttatttatttttatttttttgagatagagttttattttgttgtttaggttggagtgtagtggtgtgattttggtttattgtaatttttgttttttggatttgagtgatttttttgttttagttttttgagtaattgggattataggtatgtgttattatatttagttaattttttgtatttttattagaggtagggtttttttatgttggttaggttggttttgaatttttgattttaggtgatttatttgttttagttttttaaagtgttgggattagaggtgtgagttattaagtttagtttttttatagatttttaaaagggttttgggtaatatagattgggatttgttaagttattaaatgatttttttaaataaagaaggaagttataaatttttatttaaaaggagtgggggatggtaatagaaatatagttagttagaagttggaagggttttatttaatttatttttaaggtttttgggtagaagggataagggaaaatttgttttttaaatattttatttggtattttattttttggatgtaagatgtagttgtgtatagtggtagtagtgaggattttggtttggtaggtttttatattttttgttgagggttttaggggttagggttgtttaataggattaagaggaaatgattataggagtttttagttgttgggggtggtttttgtggttttttgggttatttttggtgaatttattttaaatttggaagaggtttaagtttttttgttttttgtattttaaattttagttatgttagttaggagttttgggggatgagaaaaaatttaattaagttttattgtgttgggtgatataggatttagaaggagaggggtttttggattgtttaagtttaatgataattttagtagttgggtttttaagttaattagtttttttttttttagtagtttttggggagtattatggtgagttgtgaggagttagtttagtatggtatatataatgtaggggtttttttgtatttttattttataaatattagggttttttgggggattagttttttatttttgagttattttttttttattgtttttttaataaggaatagagaaggagtttttattgtttaattagatgtagaaattgatgtatgtatagagaggttatgtgtgatatggtttggatgttgttttttttaaattttatgttgaaatgtgatttttgatgttggaggtaaggtttggggggggtggggtttgggttatgggggtggattttttatggatggtttggtgttttttttatggttataaagtttgggagatttgattgttatagagtttgggagggttgggtgaggtggtttatatttgtaattttagtattttgggaggttaaggtgggtggattataaggttaggagtttgggattagtttgattaatatggtgaaattttatttttagtaaaaatataaaaaaattagttgggtgtggtggtatgtgtttgtaattttagttatttaggaggttgaggttgtagtgagttgaggattgtgttattgtattttagtttggttgatatagtgagattttattttaaaaaaaaaaagagtttgggagtttttttttttgttatgtgatgtgttagttttttttttattttttattatgaggaaaagttttttggggtttttttagaagttaagtagatgttggtattatttgtatagtttgtagaattgtgagttaaataattttttagttttggttattttttatagtaatttaaaatggatgaatataatgtattagtttttttttttggattttatagtgtgtttggttggggttgtgttttggggaaatggtaattgtgaggtttttatagattgggtttgggttttaattatagttgtattttagtgttttgatattgttgagtggatgtttaaaaagtattgttgggtgaatgtgtgagtgaatgatgaagatggaggtggttgttggtgttagggtaaggttttaggagtttggggaggtggtattaggtagtttaggttaatggttaattttggatagggttaggaggtagttagaatggttaaggatagttaagggattttaggtaagtggttttattttttttaggtgggtaggaagtaggaattagattaaggggtgttaggtggtagtggtatttagggggtttgaggagtaggtgtaggtttagtagggttggtggtgttatgtgtggggttgattgtggttttgtttattgtttttattttttggatgtatgggtttatggtttttaaggtttttttttgtttttatgtttatttttttaggttttatttttagatgttaagttatttttttatttttattttttttgttgtttttatatttgagttgattttttttttgagttttggtgaaattttagagagtttagaggtgtagtttatatttttgtgttataaggtttttgtagtttttatttttttgggatattttattttagagttgggtgtgtatttattttattggattagaaattttaggaatgtttattttgtatgtttttgttttttattttttgtttgttatttagtttgtggttgttatgtggttgggttttggtagttattgtagttggtaatatataattagtatttttgtgtttaggttttgtgttgagtttttttagttttatttttgtttgtttttaaaatggtttttgatatggtaattattattatttattttttagataaaagattatagttttaggagaggaggaatggtaggtttgaggttatgtggtttgtaataggtaaatggatttggtagttattttatttttgagtggggtttttttttgtttgtagattttgttgaggttttagagtttggagttagtgagtttttattgagtataaggatagtggtggtgttggggttggaataaggtagggaggggttttttaaattatagttttggttgtggatttattttgggattttgttttggttgggaattttgttttagtttatttgggatatttttttattttgagttttgtattgggttgtgtatggggtttgttgaatgagtgagggtaggagggatggtgagtagggtggaaagtgattatggtgggtaggtttttgttggaagtttgaaatatttttggtgagtaggaaaatattaggggaagaggttatagtttttagaagggtttgttggggattgttttgtagtttttttattgggataggtagaaaatttagtttttttttagggtgagtttaggaagtttgtgggggtataggttttagttagggtggtgtgtgggtttatttaggggatgttgttgtggtttagagttaggttaaattttatgtattttgtaaataattatttataataaataaggtttatttattttttaagaagagtaaaatattataggaggtatttttttattaattaaatatgttatagtgattttattgtgttattgagggagggtattagggtgtttggtttagagtaaattgtggttagggggatgggtatattgttaaattggttagatttttatttttgaaaatgtgggttaaattttttttaataagttataaggaaatttagtgtgaattttatgtttttattattattggttgttttggaagattgggaggaggggttttgttttttttttatttttggttatagggtttgaggttataatttggattgggattttaattttttttttggggaagaggtttatttagggtgtttgttaaggtttagtgtataaatatggaatttgtttaatgtttgttttggtatttttgggttttttatattgggtttttttatttgattttttaagtagtgagagtgatgggatatggggtgtttttaggggagatttggggagatggagtaagttttttagtttaaggtgaggttttgaggtatggtttatgtagtgatgttttttatgggaggtttgaggtatgattaggagtttggagatttagtagaggtttgggtatgggatttttggtatgtagttagagtgagggttgaggttgtatggatgtaagtaggtgattttgtgttattgggtgttatttgtgttgggttttgtgtagttgtttttattttattgagttttagggaggtgaggtaattattttaggtatatagttttgggggtaaaggttggatttaggtgtgtttgattttagaatttaagaagataagtagaggagtttgagttttttgagattgtagtgatggtttagtgttttaggatggttaggttggtttttgtagttttagttaattgtgtttttttttagttatttagggttttagtgttggtttttgagatttggtattggttataggggtttatttttggttgtggatatttagtgttggttattgggatttggtattggttgtggggatttgtttttggttgtggggatttagtgttggtttttgagatttggtattggttatggggatttgtttttggttgtgggtatttggtgttggtttttgagatttggtattggttatgggggtttgtttttggttgtgggtatttggtgttggtttttgagatttggtattggttatggaggtttgtttttggttgtgggtatttggtgttggtttttgagatttggtattggttgtgggggtttatttttggttgtagggatttagtattgtttatggggtttgtttttggttttggggagttagtagtgtttgtggggtttatatttggtggtggggatttggtgttggaggattttgatagtaaaattatagaggtgataggtaatagtaatttattagtatagtgtgtggtttgttttagttatggtatttttttttattttgtgtttttttattataaagtttagtgtaggtaatgaagttaagaggtggagaatttgtaggaggatgtatattatatttgttttttgtgtggtgtttttgtattttgggtggttgagattttttgttttttttttaggtttttttgtgttaggtttgtgttgttttttttggttttggtttttatttatttggttttttagttatagatagtagtgatttttttttttatttaatggggttattgtttagtttattattagtttttagggttggtagatgatattggttatgggtagtgttttttttggttttagtatataaggtataaaagatattattttgttttaagatttttttagttatgtggtgtatgggaagtggtgttgggaattttttagggtagttttttgttttgggggagattgtgtttaaatttttgaggaaatgttgttttttggttttttttttgaaaaattttttaaggagattttgtgtggagtgtgtagggagaatggagatttttgtgagattgttttgggatagttttatagaaattataaattatttggataaaagttgaaaatttgtggttatataatgttgattatttatttaaatatttgttgagtaagtatttatgatgtttgggaatttaggatgtggattgataagatataatttttatgtttgttttagtgatagagagagagatggtattattaattttgtttgttgggggtttttttggagggggtgtgtaggtttagggttgaatttgtttagtggatgtgttatttatgtttgtgtattttttggttttgtggtggtttttggaataaaggttgagagataaaagataaggatttgggggagggaggatgtttatgtatattttattggggatattagtaaggatgattgtttagtgattatttagtgattgagttatttggtgtttggagtttggtatttatagagtagggtgggggtagtaggttttgttgggggtataggtttgagaagggagtgttgttagttaggtttgatgggatagagagtgaagggttttttttttgaaggttatgtagaggttggaggttaatgttagtaattttattaatgttagttttttgagattgatttagagttggggttttaagagtagttttgggtgtttaggagttaagattttatagagggtgttttttatttttagtttagggaaagtgataaatttggagtgtttttgtttatggtttaattattgaatttaaatgaatgtattgataaattgtatttagtgttatttatagggaaaagggagggaaaaaaaaaaaagaaagagagttaattgtgtttaggttggttggttagggggaggatagatgggttattatttttgttattttttaggttttttgtattgattttttatttttagtaaaattaaggtttagtttttttttgtagttttggagttggttgggatgaagtaatttttgtaggtagattattaggtttattgtgatggttttagtagggaatttagtttaggttatagtagtttaggtgtttgtagaaggtttagatttttgggtgttaagttttttttttttgtatttgttttggggtttggtggggtgggtagtgtgtgatttttagggttgatgaaagagaggaggaagaggttgagtggtggtgagtttgaatagttaattttgggaggggttgaggtggggaaggtttttattgttgttttataggttttggagtaaggtttttatgattttattagtagttgggtaggtataggtttaggtgttgagtgtgttaggatttttgttgttttttgggtgggggtgagagggatttttatgggtttgtaattagatttgtgtttttttagttaattttttattaaataaatttatatgtatagtggattgggtatggttgttatttttgggagtttttttgggaaagttttttaaggttttgttgagttttgggaataggtttttatttgtttgggaattgggttggtatttaataaataaattaaagtttggtgttggaaggtagaattttgggattagagttttagttaagggttataagttttttaggaagttttttttttaaagagtggttgtgggatgttgggagtttttagggtggttagtttttaggtttttttaaagtttaggtggtattgatgttttgtgttaaggtgagggttgtagagaggggttggtggggaggagtttttatagtttattttggttattgattttatttttaagtattgaaataaagttttttttttatatttttggttagggagagagggtggaagttttaaatatttggggtgtatgggaaaggtttatatgtatagaagaattagataatggaagttgttggtggtggtgataggttttttaaaggggttttgagatttttgatattggtagggaagttatatattgtattaggtttgggggtagggagaaggggtttttaaggatggggttgtttttttttgtggaagtgttttgtattgtttgataagagtagtttggattagttgtggtataataggaagttgggagaatatggtggtttaggaggttggttagggttggggagtggttaatttagagattttggttgtttaagtgggtttagggtttttggggtgaaagtttttgtggagtatagtggatttagtgtttggaggatagattttaggtttagataaggttttttttttttttttttgagatagagttttatttttgttgtttagattggagtgtagtagtataattttagtttattgtaatttttattttttaggtttaagtgatttttttgttttagttttttgagtagttgttattataggtatgtgttattatgtttggattagttagtatttttagtagagatagggttttattatgttggttaggttggttttgaatttttgattttaggtgatttgtttgttttggttttttgaagtgttgggattataggtatgagttattgtgtttggttaataaggttatttttgatatggaatgttggtttgattatagtgtttgatggtttttgtttgtaattatgtttttgttttttattaaagtagggtttttagggtagaagttgtatttttttattttagagtgttttatgttattttttaggtgtatatagtgggttttttttattgtagttgaattggttttattattattataatgatagtttataggggtgggggttagtgggaatataaagtggttaatgtaatagtgttttagttattttgatatagaaatggttaggggatagaaggggtaagttgggagttagtagtaatttaggtttttagagatgagtattaaaaaaggtgagttatattataggttttttttgattatattttagtttaaaagagatttaaggagaaataagaattttatttttttaataaggatttgtatattagatgttaagtaaatattttttttttttttttgaaaaggagtttttggggttgttgggggagttggttaaagagaatgatatttatggaaatatatgtggttttattaagttttaaggtaaggtggtaatgaatggaggaggaaaatttatagtattattagggaatggggtttttttttgttttttttttttttaatgggtttttttatgtgggatttaaattaaattttaattttattttgatttagtaggtgttgtttttatagttttgaatagatttgttagaaaattattgtttaatttgtttttgggtggtatatttttttttaggaaaggaattataaatttattttagatgagtagagagttgttttttaaatttttgattaaaatatagtagattttatatgaaaaagtaaagagagaggggttagggatgaagtgtagtaggttggaggttgagttagtttttagagttattgggatggtgttttaggagtagatggtattgtttataaagttttttgtttttttttgttttgaggttggggattattttgttggttgtatgatttagtttttggggtttttttagtatgaaaagattttttgaaagtaggtttgttagggagattttttagtttttgtttattgatatgtttttgtatggttgatatgtagtatgttattgtagagaagtaaagtatatgtagattagttttgttagtagtattttttttttttgttttttttaggaatgttttgtatatatttaatatatttaggaatttagagttgtgttgtagtagtagttttttggattttagtgttggtgttgtggggagttttggttatggtattttgagtattgagattatttttagtttttagttagttggtttttgggagtttagaggggtgataatttgagtggagtgattttagagaaagtggtggttaatttgaatttttttttggtttttttggaagttagggaaattttttgtgaaaaggaaatatgttttaagaagttttgggtagtaggagaatttagttatttagtttagttggttaaatatttataaagagatagttgtgattatataaagttttatttttttattttgaggttgaaaatttggtttttgtgtggagattgagttttttgttattttttttttggggattttgtttggttttgttggttttgggttggggtttagggatagtgtggtttttggtattgttattatggttattagggtttgttttgtggttgtgttatttgagagtttttgagttagtggtgtaaggttgggaagaataaaggagtaggatttattttagtagtggaatgttgggttgtgttggatgtgttgagagttgtggtttgtttattgggttatatggtttagagttgagtagaggattaaaggggttttgtggttgtggaataaggagttttttagagtgtggggtagaggtagggagggattttgattgtttgggaagggaggtttggtggggaattgttttaagggggtagggtgaggggagtaggaggagggggtaggtagagataggggtgtttagtggtaggtttggtgtagaagtaatttgaaggtatgggagggatgttaaggagttgttatatgttaaaggaaagtgatagggtttttgggaagagtgagggggagttgttaggaagaagagaggggaagaggtttttagggatttttggttatgttgtttttgtttttgtttttgtgtttgttagaggtggtgtttgtgaggagttttttttttttagttaggttttgaaattgatttggatattttttttttttgtgttttgtttgatatttttgttttttaggtgtttttttatttatttgtttagatattgttatagttgggtttttagggagtatggttagttattttagaaagttatttagatttgtagttagggttggaatatagttatttgggtttgttttttttattttaggtgtttgttggttgggattatggaagggagaaggagtaggagaggaggggtaggggatgggggtgtagtttattttgagttttttttttgagagtttttggatttagatttgatttagtttttgtttttttagtttttttagtttttgggggatttggttagtgagttagtttttttttttttttttttttgtaggtttgggatgtgttgggatttagaggggtataagtaagggggtttttagaggagggagttgatattataggggttgggtttggatgttgggatttgttagatttattttagtgttatgatttttgaatttaagtgagttatttttagtaggggtgtggttatttttatattaggagagagtgtttgggagtgggtttgttttgagggtttgttgggggttgggagggatttatttaaatggaaagaagtttttggtgatattttttgagggttaggggttgaattttggaagttatgtttttaggtagtttttatgggattttatgttgagtgttgattgggttttatatatttttattttttttattttgtatttttatatgtggttgggggtgattgaagttttggggtatttgttatattggttaaataggttagttatgtttagtggttttttagttagtagttattggtatttgatttgttgttttttattttttatggttaattttttttttaaggttttttggttttatggttttttttatttttatagtgaatggttgtggggagttgttgttattggtttttgggtgttaggttagagttgggggagtgtttgggagaagattgtatgtttggagtttttgtttttatttgaatgggagggaggttggtggtagattagagatttgggttttgagttaaatattgaaatttaaggttttgggtttgttatttaatatttgtggaatttgattttttttatttataaaatgggtattattaatattagttgttaaaattatagtaagatatatatgtttaggttaggaagtgtggttatttagaaaatatagttttttttttttttaagaagttaatttttttagtattgggagtgagaagagtttgttttttttattgtttgtagtttagtttagggtatttttattattggtttttaaagggtagttttagaaattgttgataaaggatgttagaaggaatttttttttggttaggtgttagggttaatagaaagttttgaggatgtagtttttattatgtttttgttttgtgggtttttttttttttgtgggtagaattttttttttttggtttttttttttgaatttttttttttttgtttttggttttaatttgttttttagttttttggttttttaggttttttttagggtttaagattttgtttttttttaagtttagttttttttttttttttgtttttggatttttgagttgggaggttagtattttgggtgttttgttgaggtggttgttttttttgtagtggttttttttgttgttattaaatgagggtttttagagtatagagaaggtatttttggtttggggttgtattttttatataaagtttttgttttttagtattttttaaagttttttattgtttagtatatatttagtatttaggtagagtagttttagagtttttttggttggtttttggtttaattttttagtagaaatggtatatgggttatagatgtaattttatattttttagtatttataataaaaaatgtaagaataagttaggtatagtggtttatgtttgttatattagtattttgggaggttgaggtgggtagattatttgaggttaggagtttaaaattagtttggttaatatggtaaaattttgtttttattaaaaatataaaaattagttaggtatggtagtagttatttgtaattttagttatttgggaggttgaggtaggagaattgtttaaatttgggaggtaaaggttgtagtgagttgagattgtgttattgtattttagtttgggtaatagtgtgagattttatatttaaaaaaaaaaagaaaagaaaagaaaaaggaaattattaaaaaatgtaagaataggtgatattaattttaatattatttatttaatagagtttaaaatattattaatttaatatgtaattaatgtaaaaatgatagatatttgatattttttttttttttttttgttaggattttgaaatttagagtgtattttatatatatggtatttttttatttggaattattatattttaggtgtttaaatggttttgtgtagttagtggttattatgttggatagtgtagtttggagagttttaatttttttttttttttttggttgttggggaatagagttttgttttgttatttaggttggagtgtaatggtgtgattttggtttattgtaatttttgttttttgagtttaagtaatttttttgttttagttttttaagtagttgggattataggtgtatattattatgtttggtggttattttttgtatttttagtagagatggggttttattatgttggttaggttggttttaaattatagattttaattgatttgtttgttttagttttttgaagtgttgagattatatgtgtgagttattatgtttatttttggatagttttaatttgattttaggataatattaggttattagagagttgttgatttggattatattatgatttgaattttttagattatttttggtattatgtttataagttatatttagaggataataggatatagtttggtgaaatatatagtggtattttttataagatattggtgaggttatagattttattattagtgttatttgtttggggatattttatttttagaaaatgtagagttttttttaagaaatgaatgtggttaggtgtgttggtttatatttgttattttagtattttgggaggttaaggtgagtatattgtttgaggttaggagtttaagattagtttgattaatatggtgaaatttagttattattaaaaatataaaaatttgttaggtgtggtagtgtgtgtttgtagttttagttatttaggaggttgaggtaggagaattgtttgaatttgggaggaggaggttgtggtgagttgagattatgttattgtattttagtttgggtgatagagtgagattttgttttaaaaaataaataaaaaaagaaatgaatgttttaggtatatgttaagtattttttagatgattttaaagatattaattattgtgattgatgatgatttttttttttttttgggtgtgtttgttttgtttttttagtttataggtgtttaggatttaaaggtagtttgttataggttatgggatttggttggtttaaaagggagagtgaggttattggaatttttttaggagtgagtttgaagtttggaatgttttttggtggagggttttgaagttaggaggtgatgtagatgtgggggttgagatattatttggggttatttgtaaagagggatatttaggtagtgattttaaggaaagagtaaggggaggagagggtggtatatttatgtttttttaatttttgtttgtttggaggtttatgtattttatatgttggtttttttgtatggatatttttttaataagtaatttattgtgtttatgtttatttattttaaagttatatagaattgtatttattaaaaatgaatttatggagatagaaagtattttggtggttgttaagggttggagagggtgaatggggagtgagttttttatggatatggggtttttttttggggtgatgaaaaagttttggtgttagatagtgttgatggttgtatgatattgtgaatgtatttagtgttattaatggtaaattttatgttttgtgtattttagtataataaaaaaatatatatttaaagtaatagaatttaatgtgtttttttttttttttgagttagtttgtttttttgttttatattttaaaattagaagggttttgagatatattataggtttttagggtaggttgaataattttttttttttaaattgtgttattttatgtggtaatagggattttgtagatgtaattgaagatgttgagatgaagagattatttaggtgggttttaaattataagtgttttttaagagggaggtaggttaggtgtgatggtttatggttgtaattttagtattttgggaggttgaggtaggtagattatttgaggttaggagtttaagattagtttggttaatatggtaaaattttgtttttattaaaaatataaaaattagttaggtgtagtagtatatgtttgtaattttagttatttgggaagttgaggtaggagaattgtttgaatttaggaggtggaggttgtagtgagttaagattgtgttattgtattttagtttgggtgattttgttttaaaaaaaaaaaagaggaaggtagagggagatttgattgtagagaaggaggaggttgtaggaggatggaggtagaggttggagggatgtagttgtaagttaaggaattttagtagagttttttatttaaagttggaagaggtaggaatggattttgttaatattttgattttagtttggtgagattgattggtttttgatttttagtattgtaaaggaaggagtttttgttgttttaagttattgagtttgtgataagtagttatagtggtaataggaagtgaatgtagtttttagtttatttttttgtttatagtaatataggtgtttttttgtgtagaattttgttaggtagttagtgagtgggataggatttttttttgtttttatttggggttttgtgttggattttttaaggttgttgtttttgagatagtgaattttttatatttatagagatttattttaaagttgagaaagtgttttttttaaggggtgttagaaagaaggttttaaggtgtttttgttatatgtttatttgtttgtgggtaatatttatagtttttttttgtgatttatttaatagaagggttataggggagggagtattattggttagtttattttatagtaaggttttattttggaagttataggggatagttgggatttttatttttaatttagttaattgggagaagagtttagaatagttttggaggttgatatttgttaggaagtgtggtgatatttatgtgttgttgaaatatatagtaatatagtagtagagaggaggggatgtggttttatagttttttttttatttatttagtatgtatgtatatatatatatatgtgtgtgtatatatgtattaatttttagtttttaggttttgtattttgtttttgttaagttttttggttattattaagttaggttgtgagtatagagtttagtttttttgttaatttttttttaatttattttgggtaatattttaatgggatgtagtagatgttttttattaaatgttaagagtaatatttttttttattttttgtgagttggtggttgtgtttttgtatgggggtgtggaggaaagggttggggagtaggaatgtggttttgagggttggtatgtatttgtagttgtgatgttttgaggtagtttatatttttatttatagattaattttgagaaggggttgggagtatttatagtttttgttatttttgggttggtaggttggggaaattttgagtagtttgagtgaaggttgtttttaggtaggtatggtgggatagaggggtttttgtatattttttgtgaggtagtgtagttgttgggttgttttagtatatttgggtgatatgttttttttttggtttttttttatttggtttgggagaatgtttaggatgttttaattttaaaaataagtaaattttttttttttgatttatttatttttttaaattgtgaattttttttttgtttgaatagtttaattttttaaagtaggtttatattatggtttttagttttttattgtttatttattttttagtttgagttatttggtgtttgtttgttttattattaatttagtttttgaaaaaatttttatggttagtatttagttttattttatttgattttgagggtagtgtttgatatgtattagttggtttttttttttttttttttttttttgtattttttagtgttggggtttagatagtttttaagggtttttttgttttttgatttagttttttggagtgattatatttttgttttagttttttagtttagttgtttttttatattttgttttaggttttttttttggaatattgtttgtttttagagatttaagtttttattttttatatttttttttttgatttttagtttttttattaaagttttattggttgtttttttttggtgttttaaattagtttttttttgtttagattttataaggttagtttttattttatgattgtttttttggattattgggattattttttattaatatttattttttattttgtttttttttgtttatgtagggttttgttggaggattttttttgttttattatttttttttttaaatagttttttaggtttttttgttaaagttgaaattttttttttgtatttgaggatttttgtaatttggttaatttatttttaagtttgaatttttatttttgtttaaggagtttatgttttttagttaggttttattgttttgtaaattttatttaaaattttttttggtaaatgttattatttttaggaagtttttttgatattttttattatatgtgatttttatttttagagttagattttgatttggagattttgatttttatttatttttgttttttttgagttttttaggttgtaggttttagtttatgtttgtgggtttttgtagtaggagggtttatttttatttttttaagaagtgtttgttttattttttgttaagttgtaattttttataagtaggtatttttaatatgtttttttatttttttttttttttttttttttttttgagatggagtttggttttgttgtttaggttggagtgtagtggtgtgattttagtttattgtaatttttattttttaggttttaagtgatttttttgttatagttttttttgtagttgggattataagtatgtgttgttatgttaagttaatttttttttgtatttttagtagagatagggttttattatgttggttaggttggttttaaatttttggtttgaagtgatttgttgattttagttttttaaagtgttgggattataggtgtgagttattgtatttagtttaatatgtttttttatattttttttgaaaagttattattatattaatagtgtgttttataaattgataataatttaaaatgtgatttattattaaaagtgtgattttatttttaaataatattgttggttgtggtttgtagttagttttattatttttgtgtgatgattattttgtagattagtaatggttttaggtttatatttaatttaattattttgtttttttaattttatttttttttgagttaatattaagtgtgttttagagttgtaaatttatggttgatataaaattaggatttttaatatttaatataaagtaattgggttttgtattggttttaatagtaattataaattatgtttgttttttgtattgggtatattgtatttagtttataatatgtgtttttgttttttttattttttttattaagatggtatataggtttaaatttgttttttgggagtaattgatttttttttggaagatgtgagtagtttttatattatatttaagaagatattgttataagattttatattttttattttagtttttaagggtttatttatttttttaaaaatttatttgttttgttataatatgtgtttttttttttttatttgtttttttaagatatagttttattttgttgtttagattggaatgtaatggtatgattttagtttattgtaatttttgttttgtgggtttaagtaatttttttgttttagttttttaagtagttgggattataggtgtgtattattatatttggttaatttttgtatttttagtagagatggggttttattatgttggttaggttggttttgaatttttgattttaggtgatttatttgttttggttttttgaagtgttgggattataggtgtgagttattgtatttggtttataatatgtgtttttatttttttttttttttttattaagatagtatatgggttttaagtttttttttttttttttttttttttaagattagttggttgggtgtagtggtttatgtttgtaattttattattttgggaggttgaggtaggtagattatgaggttaggagtttgagattagtttggttaatatagtgaaattttgtttttattaaaaatataaaaaattagttaggtgtggtggtgggtgtttgtaattttagttatttgggaggttgaggtaggggaattgtttgaatttgggaggtggaggttagagtgagttgagattgtgttattgtattttagtttaggtaatagtgtaagattttgatttaaaaaaaataaaataagtgggaagaggggagatagtggaataaggagtttaatttgtaattgattgtgaataattaattgagataatttattatttttggattagttatgggttttattttttatttgtttttttgagttatgttttttagtgaaattttatatgtatgtgattaaatttgtttttttttttattaatttattttgagtgagtttaatttatagatttttaaatattgaatttaagagggtagaggaaatgtattttttttttgttataaaaatattttatttttttattgtagtgttgtttgttttatttatagttggtaatttggattttgttttttaaagtttatgaaagtaggatagattgtttgtaggatgtttttgttataaaaggagggttaggtttggtaggaggaaagaaatggaagtggtaaatgtttattttttgtgttagatagaggtattaggtgtttattgttttggggagtaaatatttttaaaaatggaaagaaaaatttttagttttattggggtgtaaaaagttatgattttttttgtggttaaatggttgggtggtttgggagataagtggtagttattttgaagtttagtttatttgtttgtaaatggagggtaatgaaattatttgttgtatgggtgtttgataggttgttgtttaaattttttgtttttttttatggggttttggggaagattatatgagttagtaatataaaagtattttgaaaattatatgaagtgtttaagtatgggggtgttggttgattttaggtttgtttttataagttggtagaaaattttttagagagggttttgtttttttttttggggtaggggttgtagtgttagatttgatggtattggtggttgtttaggttatttggtatgagattgttgttagttttagatttattttaagtttgggagggaagtaggttggggtgggggttttgaaattttttatatttttggtagagatattagggtaggtaaaagtgttatttatggtaaattaagaagtttgtttgaattgggtttaaattagtttagtttagaatggaggttagttttattttttttttttagaattaggagtttagtatattagaggttgagaaaatgttggaatagtttttttatttgtttgtttagagatagggattttaagttatttttttttttagtttattttataaattttttgtgttagattttttttgtttaggagttataggttttatttgggagttatttagggttttaaggtttttattatttagttgtttattttattaggttaggtttgtaggtatggagattagtaggatgtggtttaaatttggttgtatgttgattagttgagtgattttgggtttattttttaatttttgggaggtaatgtttttttatttgtaaaaaggggaaagggtttagtgaggagagtgataagtaaaggagatggtatttgtgtagatggtattgtgtgggtgtttagtggatgattatgtgttatttttttgttttttttttttgtttttgtgggagtgtgggtagtagggagttaagaggaagggagtagttgtttgtttgggatgtaggttgttttgaattggaagagaaaaaggaataagtagtagttgtttattgataagttttatgtatttgtgttttaaaattttaaaggtgtatttgaaagattttttgggtaaatttttttttatagatatatgaaagttaggtgtagtggtttatgtttgtaattttaatattttgggaggtgaaggtaggtggattatttgaagttgggagtttgagattagtttggttaatttggtgaaattttatttttattaaaaatataaaaatttgttgggtgtggtggtgggtgtttataattttagttatttaggaggttgaggtaggagatttgtttgaatttgagaggtggaggttgtagtgagttaagattgtgttattgtattttagtttaggtgatggagtgagattttattttaaataaaaataaatttaaaaaaaaggtatatgaaaaaggtaaaatgttatgagtgttttgttgtaatgtgttagttataaatgggaattggaggattttttaagttatttttttttttattttttttttttttgtatatgtattaatagttttttgggtgttggtagtattaggggatttggggtgttttataggttttgtttgtttagattttagagttaaggaggagatataaaagttaaaatagggtggtaagtggaataaatggggattagatggggtaatttggtagtatttggtaaggttttttttaatgagtttttaaagaggtttagtttttaggggaaggaggtgttttaggtagtgggggtttgtagaggtgaaggtttagggtggggtttttagggaagttgtttaggatgtttgaaaggaggggagtaatttatgagtttggtgatagggttggttataaagtgttatgaagtattaattaggttgtttattagtttttaggatagaaagattatagtagttaaggtgtggggatttgtttatttgatttttatttagtttagaaaatgattgttttagggttataggtaatagtttaagttttgtaagttgttggttatagggtgtagttgtggtaaggtggggatgtttattagttaagttttttaggatttttgggttgttggatatgtttgtaggatgttatgggggtaggttagattaggggtatttttatttttttttttaggttttagtttttaggttagagtgttttttggtttttggggtttttagggttgtagatagatagggagaggtttgtgttatggtgggttatttggtttttgtaggaagtggttagaggttttagtatttggatatagtagttatttttttaatttttgttaatgttgttgttgtttggggtttattttttttaatttttttttttaattagggaggaaagtattttggagtaggaattgggttatttagtttgatattttagtatgattttgtatgattttgggttagttatttaatttttttgggtttttatttttttatttgtaaattaggtagataattttttaaagttttttttagttatagaattttaagtgttaaaataaaaaaaatttataaaaaggaaatatgtgtttagtttatatttttgtttttatttgttaaaaggggaaatggatttgttatggggttttttttttttaaatagatatgggagattttttttatgattgtagaattggagtagtttagaggagtttagaattttttagagtttgagatttataggggaatttattttaatttttttgggatagaagtattgttgtttaatggtatttaatttttattattgttgtagtaaatgattatatatttgtgatgttaaataatatagattagttttatattttattttattaggttatagggaaggtgtttatagggttgtgtatttttttgaggttgtaggggagattgtgtttttttgtattttttgtttatttgtattttttggtttgtggttttttttttttttttaagttttttttattgtattttttagatggtttattgtgtttttaaaaatttttgtgatgatagtgggtttgtgtggattatttaggattatttttttattttaagattagttgattagtgattttagttggttttgttatgttatttaatgtagttttaggtgttggggattaggatgtgtttaattttgggagttattattttgttaattttaagatataggttttggagggagatgaagggtaggattataggtttaggaggttgtttgtgtgggtttgaattttggttttattattaaggaattgggggagtatattatttgtaaaatgggggttggtggggaattagttttttggttgttagtgtagagtgaggtagtgtgtgtagtgtttggagtagttttgtgagtatttgttttttttttgttaaatttataagaattgattttggtttaatggtttttttaaatttttagttttttttggttataaggttaggagtatttttttgtagggttatttaagtttttagtttttttgaaagttttggtttatatgatgttggaagtagatgtgttgtgggttgtttatttatgtatggttattggagaggtttggatgatgttgtttttaatgggtgtatagtgtagggtagggttaggtattaataattagttatagttattagtgtaagtaaggggtttttattgttatttttggtttggggttagggagaagttttgggaggtatttgatttttttatagggagtggggttataggagaatgtatttgaaaggggttggggggtagtagaaagttttttttagaaattttatttttggtttgtgatagatgatttttttaggttattattggggtttatttgggtttttgtagtatggagtttggttattttagaaggatgattgggtaggttagggttattggtgatggtgatggtaggtttttttgaggtttttttattagaagtattaggaggttagagtagttgataagtttttatttggtttttgaggggtagaaggttttgagtagttttttgattttttgaggtttttttattttattgagagatttttgagagtattgagagttattttttggtttttttgtgagagagttggttatataaaggtagttatatatttagtaagatgaatttataatttttgagtttaggtttattttggtttttttatagggagtttttgggggtgtggggtgggggtgtagaagggaggggttggtgttttatttttgggaattaggttatgagttttggatttaggttaaattatagaggttttatttttttttaggttttttgttttttaattatttttgtatagggtattttttttttttttgtagggttttattggggtggggtgaggaggagttatagaattatagtagttgttatatgggggtgttaaggtagggatgttgatgttaattgaatgggtatgggaaggtagagtaggaggttggtgttttgggtttggttaggttgtgtgattttagggaatttattttattttttttggtttttagttttttttattgtaaattgagggagtgaggttaggtgatttgtataattgtgtgaatttgtgttttgtattttttatttattattttaaataatgtttttaaattttagttttttaatgttttggtatttttttgtttgagaaatatttatggttgttttttatgttgtgttttaaatataggtattttggtttttttttgggtgtttttattagggttagaatgggtagtttattttgtaggaatttttaaggatttttagttatttttaggatgggggttggttgtttggaagtggtttttgtttatttttgttgtagtttttattatgaggttagtgtagtaaaataggaggtgtaggtggttggggttaggggttaggttattttttttagtggggtaggagaggggtgagaaaagttggatattgattattttaggttgagggtttgtgtggaggagggggtttatggtaaaggaagtgggaggatgggaaggagtttttgttggatatttttattttgttggttttagttttgtttttgttttatttgtggggagaaagtgaggttttttgttttgttaaattttagtaatgaattttatatttattttattttttgtttattggaaattttttttttattttttggatttgttttgaatagttgggttgtagaagttggtggaatgaaatatgtagggtggtttagaggggattgtgttgaatagtgttgtgtttttgtttatttttttttttgaagataaggtttttttgtttttgttttttttttgggaaagttggagagggggttgaggaaatgggatttattattaatttttttgtgtatgttggtttttagtaggtatttttatattttttaattaggtttgtagggtggaaaggtagttgttgagtttaatttaatttttatttagttgtggaagttagtgtggatggtaaagtatttatgtataaatatatatatgaggttgaggttaagagaatatgtgtttagtttttttttggttttttagtaatgtttttatgttttagttttgttttaagttttaaatggtgtaaggtttttttaggtggaggaatggaagtttttaagaagtttgtgttttagggattatatagaggtagggtttaggagtaaaggtttttagattttgtagtgtggtgttggtaagtttgtgttgttgtatttatattgttttgggatgaaggtgatatgttgattttttttaggtggttgtaggatagttaggaggaggtgagatgttagttaaaggtagttatagataatagtattatggattattagaaatgttatttttgtgttaaagtgtttgttttttttagttgttttattttgtgttaatattttttgggagtgatatgtgtgagattgggttgtgttgatgagtgattattggtatttttagattatattaaggaggggttattttgttgttaattaggtgtagggtaggtggtattggggtatgatgatttgtttggtatggttgttttatttttttttttgtttgagtataggttggtaggtttagaggagaggaggaaatagagttattatggggggtgtgtttaggggtgagttattttaagaagttatagaattagggtatgggagatattgtttagttttgttattaatttgttgtgtgaagttggttaagttattgtatttttttgggttttaggttttgtaattagagggttggttgaagaggtaaatgatagtggttagggatgggggtattgaagttagattttttgtatttggattttttttttgttatgtttagagggaggtttgggtaggttatttaatatttttgggttgtgggttttttattggtgaaatgggaataataatagaattaattttatagtgttgttgggaggattaaaggggatatttattttaggtaaagagtttttaagatagtttggggtttttaggaagtttttgttattattattggatattattatttttgttatggttgttagggttttgtttagtattggtagtttgatgttggtagaggaagggtgaggtttttgtttttttgtagtgttttttttttttttttttttttagttatggtaataatagttgaagtttatttttagttttagtgattggttatttttttgaattaaggattgaaggttttaggtttgttatttaaggtttaggtgtaagaggggtgagttattggtttttgtttttattatatttaggtttttatatgtttttttaaataggtttttgttttatgtgtaagagaagatgttaatttttatgtttggggtgggggtgtttataaatgttttggatgtgagttttgatgggggttatggtgtaggttttgttagggtatttttaattataggggattatttgtagtttatagagggttttttgtaggttaatgggattttgttattttggttgttattttgtttagttatttggtaaggaaaataggttgtagatttagaggtagtatgggtttatatgttagtgagataatataataagggaaggatgtgtaggatgagggagttatggagattttattgtagttttagttatttattagtagattttgtgtggatgttgggtaggttattttattaatttttaggatgtttttgtaggttttgtgggtggatagggtgaatggaggtataaggagggtaagtttgataggggttggggttgggtttggagttagaattttagttagttttgttattgtattttagggtattttttgtagatagtaggttaaagtaaggttgtttagattaaaggggaaggggttttgttttttttattaagggttttttggagattttaatatagatttttagtttatagatattaaatttagggtttttgagaagtgagaaatgtgaaaaatgtatagaatagttgtagtttagtgtttttaatatgttagatttatataggtatatatagtgtttttgtagaggttagaaagttttgtgttgggaagttttttgattgggggaggttttatagtaagtttttttttttgtttatttattaatgggtggaaggttttaattaggattatatgggaagggttagtgggaggggtagagagggaaaatgaataggtaatattaagtgtttggggtggggggtgtaggggatatttaggaggggagggtaggggtgtattttttatttaatttatagggaatgggggtttgggaggtgtaggagaaggttttggtatttttatttttttttttttgtagatttatttatagtttgtttatgggtagttagatttagttataggttagatgtttgttttagttttatttttttggtttattgaaagtaagttaggatagtgagggggatgatgttgttatttttggtatggttatgttgggttttggggtgggtgggaatgtggttggggtgttattttttttggttgttataggtataaaagtttttttgtgttttagtgttatatgtgggttttttttttgttgttttaataggatggatatttaagtagattttgttggttggggggggtttttgtatttagttttattttgatttagtgaattttttttttgttttttggggtaggagttattaggttgggttttaggtaatggttagtgaaggggttgtatggaggggttttttaggtttataggaagggaggttttttttttttgtaatgtggttgtagtattttgtgattgagagggatattatggttggagatggtgggatggaggattttttatagtatttttgatgtttagaatattttattttgtataaaaaagttttaaatttttttgagggttgaagttatttagagttggggtttttgttttttaggttaaaagtattttgttggagtagttgagagtatagtgggaggggaggggtaggagggaatagttttgttatggtgataggggattttttgattttaagagggtttgtagatattattatttatttttagttttgaattgttttttgttaaggggttagaaatttttgggagggggattatagggggttttgtttatgagaatagtgattgtggttaggttatagtttataagttagtaattttgtttagttgttgtggtggtttttttttgatggtttttagaaaaagtgttttattttttgttattagtgttttgaaatttaagaatattttttaaatagtaattgtagtaaaagttaatgttgtgtgagtgttgtaggtattatttttagggttttatatattttttgtttagtttttataaaaattttattttatttttttttttgttttttttttttaatagtttagaaaatgagtatggaagggttaagttggtttgaggaggggttggtggaatagtttgagggtttagtttttaagaattttatattgtaaagggaatttttgggttagggagtagggtatagtttttatttttttatttttgtttttagtattaggtttgatatagatggggttttggttatgaataaatgaataagtgaatgagagtttgttgagggaagaaggtgatagggataagggagaaataaagtagttaatgttgttgtgatgatgatgatgttaatggtagtattgatatgtgggtttttgttatgttaggattgttttaagtattttgttttatgaatatttttgttttttattatgttttgagtggatatttttattagtttattttatagaggggaatatagttgagtgtattggttaaggttatgttgttaggaaaggttagagtttaggtagtatgtggttttttagttgggttttggtttatatggttttataggtagttttatgaaatatgtagagagagtatgtgaggggtttttttgttgttttttatttttagttggggtttattttttgttgaaatttttttaatttgtttttaagttttgttagttatgaaatatttttttgaatatttagtattatttttttatggttatttggttttatttttttatagggtaagttttgggtgaaaagtagaaaggatgaaaatttttgagagaggtgataatgtggtaatttttttttttttttttttttttttgagatagtattttatttttgttgtttaggttggaatgtagtggtatgattttggtttattgtaatttttattttttgggtttaagttatttttttgttttagttttttgaggagttgggagtataggtatgtgttattatattaggttaatttttgtgtttttttgtagagatggagttttgttatgttgtttaggttggttttaaatttgtgggtttaagtaatttgtttgttttagttttttgggattatagatgtgaattattgtgtttggttgaggtggtttttatataaagtagagaaaattatttttagtttaaaataaattaataagtattgagtgtttatgtagaaaaagattagaaggaaatgtgaatatgttaatagtgtttgtttggaggatgtaattattattgattattttttttatattttttaatttaattattttgttataagtaggtgtgatttttaaaattataaaagataaatgttggttttttgtttgtgttttgttttttgagatagggttttattttgttatttaggagttggagtatagtggtgtggttatagtttattgtagttttaaatttttaatttaagtaatttttttatttgagttttttgaggagttgggattataggtaagtgttattatttttagtatttttgttgtttagattggttttgaatgtttggttttaagtgatttttttattgtagttttttaaagttgggattataggtgtgagttattatgtttagtaaagattgttttttaattaggaagatagatgttttttagtattttttgtttttttttttttttttttttttgatatggagtattgttttgttgtttaggttggagtgtagtagtatagttttggtttattgtaatttttgttttttgggtttaagagatttttttgttttagtttttagagtagttgggattataagtgtgtattattatatttggttaatttttgtatttttagtagagatggggttttgttatgttgattagtttggttttgaatttttgattttaagggatttatttgttttggttttttaaagtgttgggattatatgtgtgagttattatttttggtttgttttttagtatttttaatttttgttttttggtattatttggttaagtagatgaaaagttttagtgagttgttagttggtattaggttggggttttttttaggtagttttaagtggttaggatttggttttttttttagagttgggtttagaaattaagattgggaatgtgtgatggttgttttgtgggtttttgttatgaggttatttttttggttttagtgattggttgttggttgtagggagtatgtgggtttagttagggtttgtgttaatatggttttgttttatttatggtttagtgggtttttttattttttgttgtatgataattttaggaaaaatgttaggagggagggagttgttgggggtgtgataggagagattttttagggatagatttgtaaaaattgttttaaagttttttttaaggatttttaaggtttttattgttttttattgataggttatggtttgggtagagaaagttggggatggagttggtggggggagggtggttagtatttgtaaggtaaggagatgagttgggagaataggggttgggagggtagttttaggttagtttttgtttttagaattattgttttttttttttggttataaagtgaggttggttagatataggtttattttataggttgggaggttgggtgtgaaagtattgtgtttgtatggggtattttatggtgaatattattagagttaatttttagggtttgttgttttatagggaagttagtgtaaggtgtttatggaatttagaagtatttaaaggatttgatagttatgagttgggaggatttagttttgtagtaggagaaagagaggtagagagataggttttgtaatatttgttttatttgttgtgttgttttgagtatagtttatttttttgtggttttgagttttagttttgaggtttttaagattttttgggtttttgtagtttaggatgtttatttgaaaattaggtttagttagtagggttttttttgttagtttattattggttagtttttgtttagtattttttagtttattatttttatttgtgtaaattttatattagtattttaagtttttttttttttaggaaggagattgtttttagatgtgttttttgtttttttttgattaaagtttagaaaataggaattagttttgtgttttttttttttattgaattgttggtttttttggatgttttttttgattttttgttaatatttttataatataattagtttttagtttttttttaaatgtaattggtgagtatgttgtagtttaggtggatggtgatgtttttattttgtaatttgtgagagttagtatattttttagttaggtgggttgtaggagttagttgtggtgagggtaggaggtttgtgtgttgatggtattggtattattaaaattatggttagattaaggttatggttaatgagtttttttatttgtaattttttttttattaaggtggttttagttttagttttggttttagttttggttttggttttaggagttgtagatatatttttaagtttttattttaggagtttggttttatatatattggaggatatggagttggggtataaatagttaagaataggtatatttgtaattaggagtagggggtggagggttgttgagatgtttttatttttattggttgttttttttgatggtttattatttattatatattgattgtataattagggttgtgatatgtttgttttttatattatattattaaatttttaaatttgtttttaatttatatatgatgaggtaaatttagagttaataatttgtttattagtttttgaatttatgggtggttttaatttttttttttttagtttttttgggtttatatgagtattgaggtataagggaattttattagttgggaagtgtgttttttttttgttgattttatagtttttttagtttgtgtttgaagttgttaatatttttttatttagtattgttttttgtagtttgagttgttgttgtgtgatttagggttagtgttttaatttttttggattatatttgtaagatgaggatgttgttgtatagtttattttaaatggttattaagttgtttgtatagttaatatttgttgagtttgtgatatgattagttttgttttaattttgaatgtggtatttttatttagtttgggggtggaattgttagtttttttttttttggataaggaagttgaaaggttttagaaggtattaaggttagttgatttgttagtaggtatagtgtttatttgttatttatagtttttttttgattgttttgtttgtttttttagttgagattttgtgtgtatttgaatattttgttaatggttgaatttgtattagggttattgtgttagttgggtttgttaggttattgtttttgagttttgtttaaggtagggttagtgtttatattttgtttttttgttagtgttttatttaaggttttggaaaggttttggagttagagatttggttaaattttggtaatgttttatatttgttgtgtgattatgggttagtgatttagtttttttgtgttttttgggttgttgtgagggttataggagatgtatagagggttttgagtttggtggttggtatgttgtaaaggttagttatgtggtgtaaggatggtattgatgataataaatgaattgaatgaaaattaggttaattgggtttggggaggggtgttggttaaatagatttgagtggattaggattttgtatatgatgagtaagtgggaatagttttaaatagtaagttgggtaggtttaggatgatttagttttgggtgttgtttagggtttttttttggtttttttgttggtttggtttttttttgttttagtttgattgtttttatgggttttaataagtttttgattaggattgaggtagaatagatagggtttaagattttgtaggtaggtatagagtgtggatggtaaaaggagatgttttaggttttttgttgtttttttttttttgaaggttgataatgttaatttatagaagaagttgttttttttggttttggattttattttaatatagtgtatgaggtagttgtgtttaaggggtgtgattatttttgtagatggaatttatttattgtgtttagtttattgttagagtttggaggatgggggaagtgaggtggggtattttttatagtgaagggaaaatttagtttagttatttttttttgtgttgtttttggaatttattttgttatggttttattttaatttagttttttaaagttttagagagttttgtttttttttttgtattttattttgtttatttgtgttgggttagttttttagaagttttgttttttgttatttttagggtattaaggttggttggtgggtttagggatttttattttttgatttagttttagtggtttattttatatttattggtatttataggtgtgttttttatttttggtttttgtataggtggttttatattttgggagtttagttttttttaaggatttatgttagagtatagggatttttgtttttgatttttttttagttttaattatgagtagtttatgttatagtaattttttagttgtttgtagttgtttgttaagttatgataatggtttttgttttttaatttaatgtttgtatatagataaattgttatattttaagtagattagatattattttttttaggaagttttttttgattgttttagttggatagaggttttttttttttgtgtttttttaatgtttaataggtatttattgagtatttgtgatatgtaaggtatttataatataagttagtgttttttgtttttttagagggtatatgaataaataaatggtaagattttttaatatttatttatgttttatagaaagttatttataggtatgggagggttgttttaattgtgggtgatagggaggtttttttaagatggtagtgttttagtaagatttgaatgaggtggttaggaggtttagggagggattttttaggagggaataagtgaatatttttttgtgaggatgagtttttatgttttaggagtagttaggttaggggattggtgtagtgaataggggttgaggggagtggttaggtgatgtagggttttataggttgttttatgatgagttagtgttttaagtatagtagatatttagggaaggtttaggttggggagtgatttgaatagattttttatttaggagtttattggggtttttgggtttatgttgttgtgttattgtatgtttttgggggtttgggggggtattttttatattattattataggtagtatttttgggggaggtgtgttgtgtaggggatttgttggttattttgttgggtaaattataggggattgtgtaggataggtggttagtttaggagggataattatttaagtaggggttagagggtatttggatttgggaggagtgtttaattttttaggtttaggtaattagaggtggggggtggggtgttgttttttgatatgggaggtttgggggtttggttgtattttttggtgtggaggtgttgggaggtgtggaggtttttttttgaggttgggattttttggttattttgatttattgttttgattttattttttagtttgagggtatggtttgaatttatagttgtatatatttttttttgtatagggttttgtggggttggtatagtagttttttttttatagattaggatgtttagttttaggagggttgggattgtttaagattgtataattagggttagatatagttgggttaattttgtgatttttggttttatgtatagattttaagtatataggtaaaattttgttggttgggagggttggggggtagatgagtggggggtagtttttttttagttttttaatatgttaggtttttgggtgggagggggtataaagattttattttttttaagagatagagaaagaggtagtggagggtttttttttggttgaggttttaggttttgagtggtgaatgtaattttatttggaggttggaagttaggtggttttgggggtgtgtgaggtttgttagtttagttgtagttttttttatgtaagggaattttttttaggtagtgtttttatgattagagagggggttaggaagaggtgagggttgtatttagagtgatatttgggtgggttttattttggggatatggttatattttttttttggatttttgaagtttttaggtgtgggttaagggtttttagttgtaggtaggagagggttttatagttatagatttggggagtttagtttgtaaagtttagaggtttttggaggttgttggtttggttttttgtgtagttgggtttttttgggaggtttttttttggtatttttagtttttagtttgtatgattttttatagttgggtttatttttttaggtttgggttatatggtgtaggttagtggggttttgggggagggtagggtgttaggaatagttttgggggtggggggattggagtagagtttattttggttgtttgtttattttgtatgaaggatgttagatttttatatgtggttatttgattttgtttaattatgtgtaagttttggttatttttattttattgatgggaattaaattggttaaggagaagtttagaatttgagtagagtaggggtttaagttttttaggagttttaggtattttttagtttttttttttgagtattgagtttatatatttagtgtttggatgtttatttatttgggggtttggtgattgttagttagtatggtttataaagggtttttgtgtaataggttttatttgatttttttaaaaattttttgaggtaggataatgttatttaatttattttatagataaagtaattgagttataaaatggtttgttaaaagatatagaggtagaaagattaatagtaaagagtttttttgtgattttgattagtaaggtttttagaaaaaagtaagggattttgaggtttttataggaatagagttttggaggagaataagagtttagttttatgttatttttaaggggtattttgaaggttaaggtattgggtttaagtaggttggattgtgttttttgtattttttttattttttgaagtttttttttttttatttaggtgggttgtggaggtgtttataatatataatggaatagttggtaggttattgggttttttattgagttaaggggtttgattagaggtttaaatagtggtatagaaattatgagttttgttgtaaattagtttaggttttggagttaagtagttttgtgtttatagttagggttagttgtttttagttgtgtggtttgaggttagttttttaatttttttgtgttttggtgttttttttgtagtagtaataggaattgttttttatggtgatagtgtagatatattttatgaagtgtataaagttttgagtttagtgtttggagtatgttaggatgtagtaagtggttatttatgatttatgaaatattaataaggtgaggggtggaatgatagtttttttgtgttgtttttaaaatggaaataaatttgtttagtgtttaaagtagtagaaagtgagttaaggataggtttttagtgatatgttttggtagagtgttttttgttggttttaggtagggtttagggtgggtggttattttttagatgagtttattgttggtatttgtttttagagtatatgtttggattttttagatttttttttttttttttttgatttttttttattttgtaatttttattttttgttatttttttatttattttttttttttatttttgtttaaaaataaataatggaggttaaatgtgttagttggttttttggaaaggtttttttgtagtaggaatgtgatgggggtagtggaggattgtttagtgtaagttatgtgatttttgtgtggagttggggaaggggaggtgttgagattgagggtgttaggattgaggtattgagatggggttattggataatggttagggttagtttttgtttttattttaataggggtttttatatttaggggttatatttttaaagttttttggataagagagataaattttattatagggttagaaatgttgtttttaggttgttatttgggtgggggtgagagatgttttgttggtttttaaatatttattttgtggataaaattattaaggggaatttaatgtttttatagtagtttggttaagatataggtattaggttgggtgtagtggtttatgtttgtagttttagtattttgggaggttgaggtgggtggattgtttgaggttaggagtttgagattagtttggttaatatggtgaaattttatttttattaaaaatataaaaattagttaggtgtggtggtgtgagtttgtagttttagttatttaggaggttgagataggagaattgtttgaattttggaggtggaggttgttatgagtggatattatattattgtattttagtttggatgatagagtgagtaagatagttttaagaaaaaaaaagatgtaggtattgttttagggtttataagtataatttgatttttgatgttggtatttaattttgatgtagattttagtaggaaaagggagatgaattagaaggttgtggggatgaggggtttatagtagtgtttattagatttgttttggtaggtataagtgttttttggaggttgttagataagtagagggtttattttagagattttggttttggagggttgggttagggtttaggaagttgtattttggtagggaatttagagttattttgagttttattttggaagtaagagttagggggtagaatagaattggaattaaaagtttttgtgggtttagttttatggggatgggtttggttttatggggatggatttttgtattatttgaggtgattattagtttggttttttgggattagttttgagtgttttttggggaaagtgggatttgtagaggatggttttttaggatttgtttgattatttatttttagtttgtttttattttagtttttttgatttttattttttatttagaattttggagatttggttttggaggtttagagattagaaatgaggggagataaggggagaagtttttttttttatttgttggttatgttaatgggttgattttttaggaagttatattagttattgttattgttttggttgttttgtttggttttgaggttgggtgagtaagtattttgttttgtttgtttttttatttgagttttttgttgatgttatgagaggtttgattatgtgtttaggaggtataggatagagtttagagttgtttaagaatatataaggttgaggtttgggttttgtatttgggaagggttaggaagggttaaaggaaaattttagttgagtataatggtttatgtttggaattttagtattttggtaggttaaggtaggaggattatttaagtttaggagttggagtttagtttgggaaatatagtaagattttatttttataaaaaaaaattaaaattaaaaaattaattaggtatggtggtatatatttgtagttttagttatttggtaggttgagatgggaggattgttgagtttaggaggttgagattatagtgagtgggatattgggttattgaattttagtttgggtgatagagagagattgttttaaaaaaaatttttatattttatggagtttagtagaatttttggttagggtgttttgattgtgaaatgagtgtggtagttgttaatttttgagggtgaagatttatttattagtaatttgtattttggtatggtgagaggaagtgtttggggaaagatgttggttgaggtagagagtttagtttaatttattgtggaggagttattttagttttaaagagaaagattaataaattttaggtgaatggtttaaaagttatttttgtatatgtagagggtgtattttgggatatgtggatatttttttttaggataggaagtaaaattagtaggtagagatgtgagtttttttgtttttgttggagttaatttggagtttttattttggtttttagggaagtatagatttttatttttattgtagttaaaagattttttgttgatttttttagtagtatttagtttagttttgtggggagaggtggtagggggaggagatagagaaagatgagtttttggtagttgtgattggggggagagaaatgtggttttaatttgtttttgtttattttatagatgggtggtgttttattttaaaatttagggtagttgagggattgaaggaagagggggatattttttaattggggtttttttttattttattttatggtgttttatataggaaagagttggaaggttttgggtttttggtatttagttaaagttttaggtaggggtttagatattgggttgtgttattattttaggtagtttgggagttagtgatggtagagttttatttttattttgattattgtatagtattttgtttttaggatagtttagtagttaggttgttttagggtttaaatttagatatttaattgtgggggttttaggtaagtggttgaagttttttgtgttttgattttttaatttggaaaatgggatgatgaaagtaattgttgggtagggtaaggggtaagtgaaagttagtgtttgagagtgatgtggttaggattgttgttgtgattatatattgagttttttttttttatttgagataagggttttattgattgttgttagaaagatttagatttagaaggattaggaaagttgttttatttataattttagagggaaggggaggtttttgtgttagttggttgttgtaggggagagggtgggagatagatgggggatagaggagtaggggtagtaggaggaatggttggtagggaagtttgtttgagatttaaaggattgtttattaggaggatagtttaggttttttttattgagaaagatttttttggatagttgggttgaggatttttaggttttttgggtggagtagaattagttattattgaagttatataggtttgtaagtataagtgggggattgtttaggtatttttgttttataggggttaggtattaaggttagggtggttagaggatatgatgtagtttagtaggggttttgtagaattattagttaagaagatatatgtagaagtatgtaagtgttttgaggaggtaaattttttgttggattgaatatggggagttgagtttttaattattgagttgggttgtttggtttgtttttttttttttgaatagaaggtttttagatagagtagttaggtaatagtatggttaagtaggggtttgtattttagttttgttttgtagtttgattaggttgttgtttttttaggagatatgggattggttagggtttttttaggttgttataggaataaggtagggttgtgattttttttatggtttaggtatttgggggagggattatgagttttagtttaggggatagataggaaatggatagtttgttttttttttaattatggagttggttttttttttattgtattttttttagttatgttttttattagaagattattgtatttaatgggtggttttgtagtgatatttagtttaatgaagttatttggtgggggttttgggggatgtagttttttgaaatatatatgggtagtgggtgagttggaggttgtgtggggttttgttttttggggatggttaggaggtgttttaattatttgtaatttgagtttatagtgattgggatttgttgtttttttattttagtttttttttattagtatttgttaagtgttagttagtaggtgttggtatggtttaaggtaggtttgtagttagattagtattgggggagggattgggagagagatttttagagtggaagttatagttttttttttttttaggttgggtaatagattattatttttagttagttttggggaagggggaggggttagttgggttgtaggtatagtgttggggttttttgaggtggttgttgttgattatggttttttttttttttgggttgggtaatagattattatttttggtttattttagggaagtgggaggggttagttggggtataggtatagtgttggggtttttgtggtggttgttgttgattatgggtttgttattttttttttagttgggttgttattttggttttgaaagtgttttttttagtttttaatttgtgtttaggaggtagttgatattttaagtgttgttatagtaggaggttgggtttgtaagtgtgatttgtttggggaggggtagagggaaagattatttttgtttaaatagtggttttttttttttttttgggggtttttatagggtttttagtttttttttggttaagaggtaaggagaggtaggaaagttttaggaatattggtagagaagagatagggtaggttgttagaggaagtaggttgtagggtgtttaaggttttaggttgggttttgggaggttagggtatgggtaattaggaggtttaggtagggaaatttgttttgtagggattttgggagataggggagaggggatatgatagttgttttttgttgttttttggttgtggtttttaggggttttagtttagattagaagtattttatgtattgggttttggtttagtttggaagtatggtttatagatttatatgattatttgggtagtgatttttaaaaggttttttgttattagttggggagtttttgaggggagggtggttttgtagagtatttggagatattaatgggttgtgaggaaaggaggaggtgtggatatttttatggttttaagagaaaattaaggtagagttggaggttgggtgtggtggtttatatttgtaattttagtattttgggaagttgaggtgggtagattatttgaggttaggagtttaagattagtttggttaatatggtgaaaattggtttttgttaaaaatataaaaattagtttgttatggtgatatgtgtttgtagttttagttatttaggaggttgaggtaggagaattgtttgaatttaggaggtggagattgtagtgagttaagatggtattattgtattttagtttgggtaatagagtaaaattttattttaagaaaaaaaaagagtagagttggaggttaggtggtttttagagtttgataaggaggttgtggggttgggttgtttttttggttatttgaggggtagggattggtttagtttgagttttagatttataagaggttgaattggagtgggattttgagatgaggtagggttattttgtttatatttgtgtttaggttttaatagttattttttttaggaatttagtttgatggttttttaggttgagaggttgttaaggggttgtaaggtgttgtaatgtgtgagttggtgggttttgatgtgtgatagtttggggtattttttttattgttagggaataggaatgaggagttttttatttttagtgtttggtaggtaggaggttgttattggattgtgtgtttaggtgttattagattttgagggtttatggatatggtatatgatttttaatgattaatgtttgtgtagtaggtgttgaggtgttttaattttgagtaaggttgggtttttggaattttttttttggtaggaggatttgtagttgaggaatttttaagaaattttttggtagtaaataaagtatggggttggatggtggatttatgagtgtttttatatgaatgtggatatagatagaaaagatggtaaatatttgtgaataaaaggaatggtttttgtgtattgaatttttatttattggtttttgtttggtataaagtttttaggaattttttaatagttttagttagaaatgtgtttttgtttggttatgtggaaaattttatatatattaagatatatgatgtttttggttttttttatgaatgttttatgttttttgggtttatgatttggaatttgtagatttttgttgtttttgttttagagttataaggattttggatgtaggaaatattttttatgtgtaagggttttttttttttttgttagggtttattggtttttttttgtttataggtgttatttaaatttttgtatttgtggttttttttttttaattattttgtgtaatttgttaatagtttttttatttttagagtttggttgttggagatatataaggtatatagaatttgtgaaatgatattgagtatttattaggtatttattgtgtgttttgtttggtaataataagtaaaattataatgttttgggtatatgagtatatttttttatgtttatttttttagtaatttaatgagatggttttataaatggggaaattgaggatagggaggttagattggtttaaagttataggttaggaggggtagggttaaaatttaaatttagatagtttggtattaaattttagttttttatatgaaaggtattttgtaattttttgagaaggttgggattattatttttattgtatagatgaggaaattaagatgttaaatggttagatagttttggagttaggaggtgggtttagtggtttatgggagtatatggaatggagtttatgggaggtttgaggttgggattttgtattttattttggtttaagggatgaggtgattgggagtgttagagatattttgggattggttatttaggtgttttgtatttagttttagtgttgagtgggtgagggtggataatttgttatttagtagggttgttgtttgtattttggtggttttttaaagtttggttaagtaaagtaagattgtttttggattagagtgatttttaagttatataagtatttagttatgttttggaggatgtaggattgggaaggttttttttttattgtatttttatttagtttttttatggggtagttggttttaggtatagattagatgtttttttttttgtttgttgttggtatgtttttggttttattgttgttttagggaggggtttaagagttttttggttttgttatttattatattttgtttagagggttgggggtttagtattaatgttaagtatttagtagtaaaattatgggttggaaagagttatagtgttgttttgatttggttttattttatattgggtgttgtttttattagtttttttttgtttttggttttattttttaggtattataagttttgtaggtttaaagttaaatttattagtttttgattttttttagttgggattagggtgaggtttttgtttaggtgtaaaagttaaggtagtgttaaaaaatttaggaattaaataatattttgaagtaatattttaaataaattaaattttatgttgaataaattttgatagggttgtgtatgtgtagggttgggtttgttttaatttaaaattttaatatttgtttattatagagattattatgtattattttgatattgaaaaatattgtattaaatattatttgtgttgatttttgagttttttggtgtttttttatattttgtttttgataagtgtttgatatattttgttttagttggttttgttttttaggtgtttttttggggttgttttgtttatgttttttgtagttattaggagttattgagttattgtatttgttttattttgttttttatgtttttgtattgtttattttgttatgttttttttgtgtgttttggttgtatgttagttttagataggagtttggtgggttgggagtttatattaatgttgtttttttttggttttggtgttgggtatagggtagtattggagatttttttttttttttttttttttttttttttgagatatagttttattttgttatttaggttggagtgtagtggtgtaattttggtttattgtaatttttattttttaggtttaagttttgttttttggaattaagtagatttttttgttttagtttattgagtagttgggattataggtatatgttattatatttagttaatttttatatttttagtagagatggggttttgttatgttggttaggttggttttgaatttttgattttaggtgatttgtttgttttaattttttaaagtgttgggattataggtgtgaggtattatgtttggttgagattttttgaataaataaatattattggtatggagatttgtttagggaatttgtttagattttgttattgtatttttgtttgttgtgtttagaggtaatttagggttgttttagttgtttttatttggttattttttggtttttatttaggttggtttgttttattttgtgggttaagaaaatgatttagtgggtggtgattagtattttttttttaatttgaaaagaatatatttattagtggtggtagtaatttaatgttttttagttgatgaaggtaatatgtttgtttataatggaatggtttatgttatggtggaatattatttagggatgtattggtatttgttataatgtggatggattttggaaatatgatattaagtggagaagttagatataaaggttaaatgtgtaattttttgtataagaaatgtttagaattggttaggtgtagtagtttatgtttgtaattttagaattttgggaggttaaggtaggaggattatttgagtttaggagtttaagattagtttgggtaatatggtgaaattttatttttataaaaaatataaaaattagttgggtatggtggtataggtttgtagttttagttatttgggaggttatggtgggaggatggtttgagtttgggaggtggaggttgtagtgagtagagattgagttattgtattttagtttgggtgatagagtgagattttattttaaaaaaaaaaaaaaaaaaaaaaagaatttatatagataggaaggaaatatggaggaggagggtaggattgatagttaaaggttatggggtttttttttaagaaaaaaattttttaaattttttaaatttttaattttttaaaattggttgtggtgatgatggttgtattattttttgaatagattgaaaattatggaattatgtattttaaatgggtggattgggttatgtggtgatttatgtttgtaattttagtattttgggaggttgaggtgggtggattatttgaggttaggagtttgagattagttttaatatggagaaattttgtttttattaaaaatataaaattagttgggtgtagtggtatatgtttgtaattttagttatttgggaggttgaggtaggagaattggttgaatttaggaggtggaggttgtagttagttgagatggtgttattgtattttagtttaggtgataagagtgaaattttgttttaaaaaaataaataaataaataaattggtggattgtatagtagtttatttggattttaataaagttgtttaaaaaaaaatgaaaaaaagttttttttttttttaaaataaataaataaaaagaaaaaaagagagaggggaaaaaaaaaaaaaaaaagaaaatattgagtgtagtatatgtatggtaaaggtaagaattttattatggaaatttggttttattaatatattttatttttatttttattttatatataggtgtgttttggtttgtggtgttaattgtatgtttttttggaggttgtagtttagattggttttgaaagttgttttttgggtaattttaaattttttataatttttgaagtttttggtttgttgggattatttagttttttagatttagttttgttattatttatttaagattgtagttttggggaggggggtttttttttaagggtgtaggggttttgtggttttatttttttttagaatatatattattttgtattgtatatatgtgttttaatatggagtattttaggatgttggttatagttagttatgtttgtatattgattgattgattgtgttttgttgattaattatgttaattattgtgttgtatattgtttttattaagtgagttaaagtaatttttttggaataagttgatggattttaaataagttaaaagatatttttttaggaaaaaaatagtaatgaattttaagaagaaagaaaaatttttaaatttatagatttatggaaaaagtttaagtttttaaagtgttagatttttttaaaagtattaggtttagatggttttatgagtgaatttttgaaaagttttaatagagagattattatgttgttgtttaaaatgttttagaaggtagagggtaaaagaaatgtatttaaattgtttttgttaagttagtataatgtagatattaaaattgataaaaatagtatatatatatatatatatatatatatatatatatgttttatttgttttagattaagtttgttgttgtgtatttaagtaatattatttatttttattttgttgttgaaattaaaatatattttaatggatttatgattttaatatgtaaaaatgaaattatagaagtattagaagaaaatgtgggtgaaatttttttttataattttagaatgtaggagatttttaaataggatgtgaattttaaaagttaaaagggaaagtagagatttgataatattaggattaaaatgttttgtgtagaagaatattttagaaataaaattaaaagtaggtagttggggataagatatttgtatttgttgtgataaagatgtataaataatttttttttttttttagataggattttattttgttatttaggttggagtgtagtggtatgattatagtttatagtagttttaaatttttagatttaaatgatttttttatattagttttttgagtagttgggattataggtgtattattttatttagttaatttttgtagagatgtggttttgttatgttgtttaggttggttttgaatttttaagtttaagtaatttgtttattttagttttttaaagtgttgggattataggtgttagttattatgtttggtttataaagaattttttttaaaaaattttaataagaaaaggatatattttttaaatgaaaagagaatatagggttttggtttataatatatgaagagataattttttttgtttgattgagatgtataaaataaaatattaattggagagtatttggtttttagttaggggtaaggggtataggatttttttgttggattattattgtatagggtttagtagatagttgagtaggttgatgaggggaggggttttaaaaaattttagtaattattttagaggttaatttaggaataaggattaattttttttttttttttttttttttgatagggagttttgttttgttatttaggttggagtgtaatggtatgattttggtttattgtaatttttgtttgttgggtttaagtaagttttttgttttagttttttgagtaattgggattataggtataagttattatgtttagttaatttttgtatttttagtagagatggggttttattatgttggttaggttggttttgaatttttgattttaagtgattagtttgttttggttttttaaagtgttgggattataggtgtgagttattgtgtttagtagattaaaatttaaatgtatatatttttgatatagaaatttattaagagtttattttttagttatgtgtgtatatgtataagtgtgagaatatttgttgtagttttttaattatagtgggaagttggataagtttggtagggttatgggatagttgatgatataattattaaaaggaatgtgttattttgggaggttgaggtgggtggattttaaggttaggagtttaagagtagtttggttaatatggtgaaattttgtttttattaaaaatataaaaattagttaggtgtggtggtaagtatttgtgattttagttatttgggaggttgaggtaggagaattgtttgaaagtggaaggtgaaaggtggaggttatagtgagttatagtgagttgagattgtattattgtattttagtttgggttatgttttgttaaaaaaaaaaaaaaagaaaaagaaaaaggaatgtgttatatttataagtggtaatagtgttgttaaatggaaaaaataaaagttggtagtagaagtttgattttttttgtgtttttgaaaagtttatatttatatattgattttttttatataagttttgaatgattttgtaggaataaaatttaggagaatgttatatttagttgttaatatggttattttttgggagagagttggggaatgggagagaaaaatttttttttaaattttatgtgatttttattttttatttaagaatgattgggtattgttttttttttttttttttagatgggagttttgttttgttgtttaggttggattgtattggtataattttagtttattgtaatttttgttttttgggtttaagtgatttttttgttttagttttttaagtagttgggattataggtgtttgttattatgttttgttgtgtattgttttttaggatgaagaaagggaaaggttatagggagaatgggagttagaatatagagtagggtttttaaatattagtttgtgggtgagagagatatggggtgatattattggtttggaatttagggatggtatgaggtgttgtttaggggttttagataaggtttgtttgttgattaagtaagggttgtgttggtttttgtttatgtgtttgtttaatatgaattttttaggtgttttattttgttttatgaattattattgtttattttaattatgttgtataggaagaattgtgtttatttttataatgagaaaatggattagagaggaaagttattaggtagggtaggggtggtagtttaggtagtgtgagggtaaagttggtgtttttttgttatttttttatatatgagtgggtaaggtattataggagtttatattttaatttttgtgggttattttggaaggtggtagatggaattagtgatttttagggttatttttagttttaggttttagataggggttgtggagtggaattgagtttgatttaggtgtgttgatggtagttatgtaattgtggataaattatttttttttttatttgtattggatgagattgggaatttttattttgggttttttaagagttttggggttttatagagtatatttagtagtagtagtgggatggggggatagggttaggggagttttatgttttttttaattttaattagagtatttttattttaatttttttttgggtttagtgtttagagagaatgggaaggaagtttagttttggttatgggttattttagtttgttagttatagtttatattttaggagttttttttggattgaaggagatagagttatttataatatttatagaaaattttggagaggaagtggagtttaattgaggaagtgtttttttgtagtttttagaaatgaggttataggtgagatagtgtgttagggtggattatatggtatttttttaggttgtttgttggaatttagggtttggttaggggttgtttatattttgggttttgaggtggggagtttgagtgtgtttttttagggttgaatgtgttttttgtttatattgtatagagtatggttgtttggttgtggtgtgtttttttggataggtttgttattgtgtagatttttaattttggtagttgttttgggtttgggaggtggtgggtatagatatagttttttttttttttggtagttgttttgattttttgggataagtgttgagaggtggttttatttagtgttatgtgtttgggggttggggttttattttggggttaggttgggtggttagggttatagagttgtagggggtggagtagagaaattgtttttagtgtttgttttttggttttatttttttttgtagttgtgttttatttaaggtattttatagttgtttggtatttgttgtatttttggattagtttttttttttttttattattgtatggtgtttggtaggttggtgaggggaggggttttttttttgggttttggagttaggttttgttttttggttttattttgttttattatgaaggagatatattgggtttggttaatttttttgtattgatttttgtttttttagtatatgtgggattttttattttagatttaggtttgagaggttttagggatagtttggagaaggagggtatttgtttttagaaggggaaagagaaagagatttaattttaaagtaaaaggggatttgggtgttttttgtaagtagtttaggaaaatgggaggaggtgggagtagtgggattttttgagtaaggtattttggtaggaatgttagtgttttttggatatttttagaagtagaagtatatagttttatagaaaaattttgtaggtttaggatttgaggtatgatatgatttaaatttattgttttattagatattagtgagttttttgatgtttattaaggttttttgttttatatttggtattggatgaatttgtatattttgttttagggagtttatagtttagggataggtttagagtttatgtggggtgttttgtaaatatggggttagaagttgggttgtttatggggttttttttttttaaattatagtggttattttttttttaattttatagtttttgatttttattaggaatttttggggtttagtaggtgttttttttttgtaggttgatgtttgttttttttattttttatttaggtttagttttgattttattttttttaaagttatttttttattgttttgtgttgggtggttttagggagttttgtgttttgattaattttatatttaatgttgtattggtagttttgttgtttgtgttgagatttttttttgttttgtttttggaatatatggtttggtgtggattaagtatgtgaagagttatgtttattattattagtttgggggggtttgattttttgtttttttaatgttttatttatatgataaagatttttagattttttgggttataggaaaattattgagatatgttgttatgtttattttgttttaattttatatttatgtttataagtggttttagaattattgtggattttttttttggtttttggggtgggtggatatatgagagtttagtttttagttatttttgtagatgtttttttgatagattaagaaattgaggttgggaggggtggaatgatagtttagaattagttgatttatggggtagagttgggatatgtttagaattgagttgggtattgggtttggttttttttttgtttttagtgagtattttaagaaggtagagaattagatttatgaatgagtgttgagtatttgttttataaggtagttttggagaaatttggttggtgtggttgaggagttggaggggggtaattttggtggggggggttttgagttagtagttagtttttgtaggtttagtattgggtgttgtagtttagttttattttattttatttagaggtatttatgttggggggtaggaaaagagtagggatttaggagaggaggtaaggttgtttttatttagagtttgagaggattagggatgattttaaaggatgagtgtttttttgtgggaggatagtaaggagggtgttaagtttaggggtagggttagagttttggaaattgagaatttattttattagtataaagtttagattttattaggttttggggtggaggagtaggtagggatgtttttgttttttgtagtgttttttttttttttttttttttttaattatttaggtgtttatatttttttttgaaatgttgattttttttagaatttttatattgaagttaatatttatttattgagttttttagtataatttttagaggagagattaggtgttttgggggtaaagttgattaggaaagtttttgtttggtttttagggatgatttatgggggttattatatttgtttataagaattataaaaaagttattttaatttattattagtggtttatttttttagtataattttatggtatatttattatgtttaagttatttatttggtattttatgggattttttttttttttttttttttttttgagatagggttttattttgttttttaggttggagtgtagtggtataattttagtttattgtagttttaattttttatgtttaggtggtttttttattttaatttttttagtagttgggattataagtgtatgttattatgtttggttaattttttgtattttttgtaaagatagggtttttttatgttgtttaggttagttttaaatttttgggtttaagtaatttgtttgttttggtttttaaagtgttggatttataggtatgagttattgtatttggttttttatgggattttttataaaaattaagataggttgggtatggtggtatgattttagtattttgggaggttagggaagttgaggtgggtgggttatgaggttaggagtttgagattagtttggtttatatggtgaaattttgtttttattaaaaatataaaagttagttaggtgtggtagtttatgtttatagttttagttatttgggaggttgaggtagaagaattgtttgaatttgggaggtagaggttgtagtaagttgagattatgttattgtattttagtttgggtgatagagagagattttattttaaaaaataaaaaataaaaaaaaaatataaaaaaaaataaagataatagttttatttttagaatttagtgggggtatgaaaggaattttgaagattatatagtaaaattttaagtatggatattgttggtttataggtgaattttaggtttttttttatttttgtattttttgtattttaaagaaagggtatttgattattttttatgatttgaaaaattatttttatatttaaaaaaaaaagtttagtagaggaaagaaagtttatatataaattatttatattttaagttaaatatgaggtatttggattaggttttgagggatgtataggagtttattaaggtagtgatgtaaagagaagtagaggttagggtttaggaggttagggtaaaggggttgtgaggaaaggtgtgagagattaagggaagattaaagtaggagaagttgggaaggagagaggtgtgagttgagtaggagagtgaattaattgtggaggggtttatggtgagtgagtagagaaggtttagtatgggaagagattttagtagtgttgtgttttggggaagttagtttgggagtaatttagttggggttttaggagattttgttttgtatttatagttttggggtggagataaattatagtatagatgtttttttgtaggtagaagttaaggggttgggtgtttgtttagagggtatggaattttttttatgatttttttttttatggtgttagttggatttttggtgtttgggggatagaggggttgtagagattggttagagttgtgtatgttggggtttagggaatttttagtttagttttatatggaggggtagaaggggatgggtttgaaggaaagatgggtaggaagttgagttggagagaattggatttgtgtttagaatggttgtgatatagagagggaggatggagaagtaagtaggtggtgttttggaggaagaattagtggggtttaggtttgggttttttgagaagttatttttattggattttaagagtatttttttattgggaaggttttgtttttgtttgtttttgtattttttttatttggatttgtttaggtttttaggattgttagtttagtttatggatttttttatgtgagttggatttttatttgtataggtttttgtttgtgggtggttgggtttgggatgttgatggtttttttttatgttttggttttaatgtgtatattttattttatggagaaagttattgtttttttagagtgttaggtttttggtagttttgaatgttgttgtttttatgtggtttgttttttttttttttttttggtttgatgaaattgtatttttattgttggggaagttttttggatattttttgtgttttagttattttgtttatggtttggtgagttttagaaagtagagtttgtaggttgtgtttttgggtttggtttttggtatagtttttggtataatttaggggttaaattgtgtttgtttttggaggagaatgtttttgtatatttttatggatatttttttatttgttttttagagttaggattatgtttttgtgtatttagtattagttattattgagatttagatggtttggtgataattgtttttttagttatattttgtttgatttagttgagtgtgaatatattaatttaggatgggggtgtatttggtatgttaaataaaggttttgtattaatagaaggtaggggaggaaatagttttttgttattttgtaaattgtttatgtttttggtttgatattatgttattagtaattattgttattgagtttgggtggttggggtagggtggttttttagagttaagtttagagagatgggagagggaatatgggatttgtatattgagggttggaaaggattttttaaggtttattagtttttggttatttagtgtgttttgatgttttttttgtaggaaatgtagagttttaggttttagatttgttaagataaatgtgtattttatatgtttatgaaagtatgaggagtattggtttttttttaaatttatattttttttaggttttatatttttttagtttttaagtttattgattattggagaatttttatttaaaaagaaaaattaaaaaggggttgggtggtttatgtttataattttaatattttgggaggttgaggtaggaggtttatttgaatttaggagtttgagattagtttgggtaatttagtgagaatttgtttttataaaaaaaatttaaaaattagttaggtatggtggtgtgtaatttgtggttttaggtatttgggaggttgaggttggggaattatttgagtttagggggtagaggttgtagtaagtagtgattatattattgtatgttagtttggaggatagagtaagattttgttttaaaaaagttaaagaaaagttaaagaagatggaaagagggatttagagagatgtggaagtaatttaagggtttattgatggaggaatagttatataatataagtgtattgtataatagaatattatttagtttttgaaaggaaggaaattttgttttatgttatagtatgatggatgaatttttaggatgttatgttgagtgaaatgagttagatataaaatgggtagttattgtatttttttatatatataaggtttttagagtggttaaataaatttataataaagatagaaaatagaatggtggttgttagtagttgggggaggggtatggggagtttggtttaatggggatggagtttagtttgggaggatgaaaagggtattggagatggatagtggtggtagttgtgtaatattgtgaatgtattgaatgttgttgaaatgtatattgtaaagtggttaaaattgtatattgtatgttgtgtattttattatggttagaaataagaagtagtagttaaattaaaaatttagattgtgttgtttgtttaatttaaagaaggtttattgagtattattgagttttgattttgtgtttagaattagatttggtttttgaggggtttttaatttagttggtattttattatagttttatggagttatgatttttgttggggttagggggtatgtttttgagaagggatttaattatgttttatagtttggtatttttaaataggttttgtgttttataggattggtattaattttttgtttgtaagttttatgttagtatggttgtgggtttgagtttttttaggatgttgttggagttttatggtttttttttttttgttagaagggtatttttaaataaaattgtgtgtagttattatatagttttttggtttaggtatttttttttagtgttttgagaattttgttttgtaggttaaggtgttttttatgtttttttttttttgttataattattttttttgggggaggaggattagattatgggttttaatgtaagttttaggaggtatatgtttttttttttttttttaagtttttggtttttgttgggtatatttaggtagtttgtaattttttaagtaggagttattagaatgtgatagtttttttaggggttttaattttattttgttttatatttttgtatgagtttgttttggtttttgtgtggttttttattttttaagttttttaggttttttagggatatatagtagatagaggttttagtaaggtttatggtgatttataaaggaggttttttgaaatttagaaaatttttttaaatttttatttaagttttgtttggggtattttggtatgtttttattagatagagagagttattttttttgagtttgtagatttttatttttatgtattttggtttttttgggtttttagggtagtattttttattttatatttagtttttttttttaagattttgtggtaaagttagtaattaggttttttattattatagtatttaagatttagtgttttgtgatttatttttttggttttggggtgtagttttagttatagggggttggggtttgggttttagtttgttttgtagttgagatataggggtaggttttgaattttttaaggtttgggttgggttgggggtggtgggtgttttagtaggtttgggtatttggatttttatttttttgggggttgtgttggtggtaggggtagtgggtattttggggattttggaggtagggggttttattttttggtgggttgatttttggggtttgatgatggtgatttttgttttttgaggggttggttttggtgttttgtggtttaatattttggtttttttgagtttgaattgggatgggttgatggttttggtgttttttatttgtttggatgagatgttaatggatagtttagtgtgttgggatattggtttggttgttttggggtttgagagttttattttttgtagggatgttttgggggagtgttggtttagggagtttatatggtgggttgagggttttgagttttttatgtttaggttttggaatttttgggtggagttggttatagtggtttggagtaggggagtttggattttttggggtggggtggagttgggtgttttgatttttttgattttaaaagatttttttaaggttgaaaaataaagagaggggatgtaattggtgaatggatggttagggaatattttggtatgttttttgttaaggagtagtagaggaaggtaggtgatgtggtggtgagggttgggggtttttttttgttttttatgttttagtaagtggaagggatagttttattttaggagaattattatgagttttggggtagagatgtaggttggagtgggaagatgttgtttgttgtgttttgttatggttatggtgtaaattatatagtttttttttttagttatgtttatataggaatgttttagttttagagaagatttttatttttttttttttttttttgagatggagttttgttttgttgttttggttggagtgtagtggtattttttgggtttaagtgatttttttattttagtttttttagtagttgggattataggtatgggttattatgtttggttaatttttgtatttttagtagagatggggttttattatgttggttagtttggttttggatttttgattttaagtgatttatttgttttggttttttaaagtgttgggattataggtgtgtgttattgtgtttggttttgattttttttttgttgtggttgtttttatttttttttatttttagttaaggtatatattgggatattattagtaaatatatttttattattagttatagtgggggatatgtttttaataataagtgattgtaattgtaattaattagaattgtagtaggaataaaattttattaatgatattaagggtggatattggagtttttagtgttggtgaggtgttgggtttattgagtttattatatttgtagttgtttaattttgggatgtaaagaatattagtatttttagtatagatggggaaagtggggtatggggtagatatagagttagattgtatattaggttgatattagagtttaaggttttaattatttggttgtttggtttttttagtttagtttataggaattaatttttttagttattagttttttttgtatttttttatttattattataagtttgtgtagtgatgttaattattagtttttgttttgtagttattttgtttttttattagggtttgtttttttggaggtagtggggatggtatttgggaagttgttatttttatagtttttataattgtattttaaatgagagttagttgtttttggttattagggttagagtagggagggatttatatggtaggtatatttattagttttttttttaggttagatttatagtgtatttttgtggagatttatagtgtttttttagttgttttttgttttattaggttatagagtttgggttttatgggattttattattgttttttttgtttataggaaaagggatgatagttggtttttagtttttaataatagtgttttaggattaattttagtgttttttttttatttgtttttttttttttaaatgtatttaggtattggggaggggaagaggaagtttaattttttaattttggttgttttagttgttagttttttgggtaaggtatttttgtgggtgttttttttaagttataggtattttttttttttggtggatatagatgaaattttgggttattaagtttaatttttattagaagttgggtaaggagttgtgtggattttagagaatttttagttgttataggttttgttttagttttgttattgttttagaggatatgggtttggtgtggttagagttgtttattttttaagagagtagaaatttggatttttatatgatattttttgatttttaaatgttggtataaagtaaaataagttttttttaaaatattgagtagtttggttgatgtggtgaaattttatttttattaaaaataaaaaattagttgggtatggtgatatttgtttatagttttagttatttaggaggttgaggtaggagaattgtttgaatttgggaggtagaggttgtagagttgagattgtgttattgtatttagtttgattgatagagtgagattttgtttttataaattaaaattaaaaataaaataaaatattgtagggttaaataaaattaaatttataggttgtatttgtttatgggtttagttatgatttttagttgattatgtggttgtagggtagtaggatattgagttttagagttaggggtgtgttaggtgtgggtttttgatatggtgtttttttgtttttttgtattttgtatgtaaattgttggttgtgttttgattttgtagaagttttagggttttaaggaaaggttgaatgtttatttttattagttagaaagtttagggtttaatgtttagaattgaatgtaatgagatgggtttattaagtttattatatttatatttgtttaaatttgggttgtaaagaatattattattgtttttgtatagatggggaaagtgaagtatggggtagatatagagttagattgtatattgggttgatgttagaaagtgtagagtttaatgtttgggtttttgtgtggtttttagggttttttgtggttttttgatttgttttttgttttttgagtattgtttaaattgtttttatatggtgtgtttttgttttatgggtgttgtagagtaggggttggtttttaggtgtttttagtatttttttgtgtggttaagttggagaatagaaattagataggagaaggttttgttttaggtttaatttaagaaaataaatgattttttttgggagatttggtgaattttttttttgggagtttttttggagttatttttattatggttaatttatgattgaagatattgtattaaagtagaggttgttttggtgtgagtttatgattgagtttatggtgtggatgtaatgatttattttagttaggtttatgtgtataagtggattattttagaattggagttggttttttttttagggtattttttttttttttagttgtttgtgtggttggtgttttattattttggttatttgtgtaaaatgtatatgtgtgttggtttttaattattttttttttttttttaatgtttggtgtttttttatggatgggtttttttttttttattagttggtttttgtgtttattgtttggttttatgatttttttgggtgttttggtttagtattatttttatgtttattagtttttagtaagttttgagatagtaggggttgttttatttgtaggggttattttattattaggatggtgttgtttaaaggtgagtttgttttagataatagttaggagattttatagtttttagaattgtaagagaatataattgtgtgttagaagaatagtgagaataggaggtgttttattttggaggtgtttattttttttaggagatgttttattttgggggtgtttattttttttaaggaaattatgttttggttggaatgttaagaaggtgatatttaaatgaagaggtgtttattttggtttatgttatttttttaaatgagtatgttattgtttttttttttttttgggaattttttttaaagttaagtttattttagttttttttttggggagttggttttttatatagtttatattattttttttttatgttattttggttatgttatgattgttgagattggttatgaggggtgtgttttggttttttgggaatagagttgaatgttttttattttatgatattatgtttttattaggttttaggtgtttttagaaaatttattaagttaggtgtggtggtttatgtttgtaattttaatattttgggaagttaaggtggatagattgtttgagtttaggagtttaagataaatttgggtaatatggtaaagttttgattttattaaataatataaaaattggttaggggtggtggtatatgtttgtaattttagttatttgagaggttgaggtgagaggattatttgaggttaggagattaaggttgtagtgagttatgattatattattatattttagtttggatgatagagtgagattttgttttaaaaaaaaaaaataattaaaatttattaaatgttaggtgtggtggtttatgtttgtaattttagtattttgggaggttaaggtaggtttaaggtaggtggattatttgaggttaggagtttgaaattagtttggttaatatggtaaaattttgtttttattaaaaatataaaaaattagttaggtatgggggtgggtgtttgtaattttagttatttggaaggttgaggtagaagaattatttaaatttgggaggtagaggttgtagtgagtttagattgtgttatagtattttagtttgggtgataaagtaagattttattttaaaaaaaaggttggattataggattataggataggtataagttttgagggagtttttaaggaggagggatgtattagatttttatttttattttagtttgtgaagatttatttttgtttgaggttttgtagagggttgattagtgatttttaaaaagatatgtttaatatttaattttaagaatttatgaatgtgattttatttggaaaaagggtttttgtagatgtgattagggattttgggatgagattattttggatttgggatgggttttaaatttagtgtttggtgtttttataggagaaaggtagaaggggatttgggatataaagagatatggtggggagggttatgtgatgagagtagagattgtagatgttgttagagttaaggagtgtttgggttaatgtaagttggaggaggtaaggaagggttttttttttgagttgttggagggagtgtggttttgttaatattttgatgttaaatttgtggtttttagaattatgagtgaattaatttttgttgggttatttggtttttagtaatttgttttagtagttttaggatatttataatgagatttttgggaagatgaaatttttggttgtatagtggtttagggtgaggttagttggtgtggttatttattttttagtttagttttaattttattataattatatttgataaatggtttattgtgggttaatggatatgtggttattttagagttgttatattaggagtttagaggagtgagagttgtttttttttttttttttggagttgtataaaaattttagatggttggagaagttattggaggaattatattattttagatttttgttttattgttgggatatgtggtaatgaaataagattatttttgttagggatgttttatgggtaattgtttttttatggaggatattgtgagttgtatttagttgggaaatattaggagatgtttgttattaggttggtagaatagggttttttagtatttttttttttattagagttttaagattgtgttttgggttttgtagttatatatggttgtttttttttttttaatgtgtaggttttttgggaagttttttgttattatttttatagtggaattggtataatttgtttaggggtagtaggtttttgttattttatatgtttttattttttttgtggagggagatgtagttaaggggtatttatatttatttatagaagtgagagtgtttgtgagtttgttattttgtagattttagaattttgtatgtgattgtatagatttataggtttaattgggtagatttaaaggatttatgtagtagggaggagtattggatagtttttttttttgtttgtaaggagttaatgtaattgaaggatatagaagaggtttttagttgagtattataattgtggattgtgtatagtgttagaaagatgtggagttaggttatgttgggaggatttttatgttgttattggaaggtaaagtagtgttatttttttatttatagagtaggaggtttttatttttgttagttattttttttatttgtgaatttaagttttttaaagttagattttaattttgtaagtttttaaaagtttttttgggttttttttttaatttttattgattttaatttgttttaaaagtttgaagattgtttatgtgttttggtttatttttgggaatttattttaaggaaataattagaagtatagaaagatttatgtatgaggatatttgtattagtattaaattgataaaatttggaaatagtttgggtttttgtagattttttaaatttatatgttaaaggtttgtattattattaaaattatatttttgaagatgagaaatgttgagaatattaagtaaaaatagtaggatataagatgtatataaagattttaattttattttatatatatatgtgtagtttgtatgtatatatatatttatatttgggtagaaaataatgatttttggatggaatgaatggtggtgggtgttgtttattatatttttttgttttttgagatgtttatattatatggggattatttagtatgtttagggaataaaattattgatattgtttttttttttttttttttttgagatagttttgttttgttgtttagattggagtgtagtggtgtaattttggtttattgtaagttttattttttaggtttatgttatttttttgttttagttttttgagtagttgggattataggtgtttggttattatgtttggttaatttttttgtatttttagtagagatatgattttattgtgttagttaggatggttttaatttgttgattttatgatttgtttgttttggttttttaaagtgttgtgattataggtgtgagttattgtatttggttaatattgtttttaaaaaatatattttggtattggttgggtatggtggtttatatttataattttagtattttgggaatttgaggttagaggattgtttgagttaggagtttgagattagtttgggtaaatggtaagattttatgttggaaaaataaaattaaaaaaaaaaaaatatatatatatatagattttgatgttaataagttggagggtgtgggtaattgtatgttggtttatttttatttttatttttggaaaaatattttatagtttaggatgggtatagggttttttttatttttaagtatttatggttttagttgttatataaaaagaggttatagtgggttattttttagatgtaaatttttttttttaggtttatggtggggttgaaataggagtagtttggatttgggtttatttagagaggaatgtgttgtataagggattattgttaaggtttttgttttgattataggttgtttggtaaattgtttttagtttttgaaattagattaagtattttttggtgtatatattaggttttagtttggggagggaatattaagtgagttatagagttttgttttagtttgggataaatgttatgtaaagaaatggtagagtttaaggttagaataattttatgtgtagtttagtttttgtaggagggagtaatgtggtttttgtttagggtagggtggaattttaggtttaggttttaggaatgttagttttggttaaattgggttttttttgagtagtagtaaagtaggttttgtttttgaagaaatattggttatttaggagttagggttagggtttagggaagttggatagatggtgttaaggagtagggaagtatttttttgtatgttattttgagtttgtaggaaaaagttatgggaaaattttatttggtagataattttttataatttttaggatttatagagtgagtttagtagtatgtatgttatgggtatttttttgtttttatttttttgtgatattggattttggtataggtttttgatttgtgtagggtggggtgggtagttaggtagggttttggtgttggtagagtggggtttagttgtaaaggtttttttattttttatttatttaggatttgggggatgaggtttaaaggtttggtgtgtttttaaggagtttaaggattgttttagggttggagataggatgtatgggtttgtatagggattgtgttttttattttagggttgagagtaggagaattaaataggagagtgatataattatagtttattttgagttttagtgtttttagtgttatttgttgtaggaggtgatggggtaataaggtgtttttgaggttaggtgtggtggtttatgtttgtaattttaatattttgggaggttgaggtgggtggattatttgaggttaggagtttgagattagtttgattaaaatggagaaattttatttttattaaaaatataaaaatagttaggtgtggtggtgtatgtttgtaattttagttatttgggaggttgaggtagaatagtttgaatttaggaggtggaggttgtggtgagttgagattgtgttattgtattttattttgggtaataagagtgtaattttattttaaataaaaataaataaataaataaaaaataagattttttgggtgtaggtatggtatgtggtaggggtgattgttgttggtgtaattattattttttgggtgtgtgtttgtgggggttgtgtatgttgaaatgtgtggttattttgttggtgattaaggttgttttggttttattgttattaattatgtttattgattttatatggtttatttttgtgtttttatttagagttttttttagtgtttaagtttttggaaggttggaaggagtgagtagtgtagtttttggttaagaattgaagtataaaaattttagtttttttatttaattttaggtgggataaggttgggggtatggtttgtagtttttttatgttgtttggtatgggggttgggtagttatttgtggttataatgagttggtgaggtattttttattggttggattttttgtttggtttatttttatatttaggtattttttggtgtttttttttattgaaatttttgttttaggatttgtttttggagggatataaattagttttttagaattggtttgggttgtttggtggaggagggaggtggtttttggggtaggtggagtaggttttggatagggaggaggatatagttggggtgatggggaggggtgtgtttttaggaagtaaaattgtttaaaaggaaaggtttaaaaataggtgtagtgaagttgagtggagtttgtaaagggaagttaggaaatagtagtgttagtggagggtggtttttaggttttttatagagagttatatttgtttagggatagggataatgtgaatagaaggtaaagtttatattaaggtggaggaggtgttttttttttagagagttgtagttagatagtttaaatttgttaaaggtttgggagggaagaattagggtattattttatttttagtttaattttttttttagttttttttttttttgtttttttaaggttaggtttggttgggttatagtgttagtagttaagatttgtttttagtgttggtttagtttgtaggaggttagtttggtggttaaaggttattgattgtttaggtttatttgtatatgtggtttaatgattgaggtttgggatttggggttattatttatagtatttttggataaggaggaaaagaattatttttattaatttttggatggaggtgtagggagtgttaatagtatttttgaaaattttaaatgtattaggggggttagtatttagggaagagttataggaggttattttgatggattttgatgattatttttgtttaagtgttaggaggaggtttttttttttttgtttttggtaattttgggtttaagaagttttaggtattttggaggttttttttgtttattatagttttatttaagaggtttggtttattttgtaatgatgatgtgagaatgagtaggtttgtttagtgttagagtttgtggttggatttttggttgaggttaagagaaataaataagttttttttttttttttgtatgttataggaagagtagtttgttggttgtaaggggattttttattttgtttatggggtatagtagtttatagtattttttttagaaatggagtattggtaggtttgggtttttgtaagatggaatataaaggggtgggtagttgattttaatagttagtttttgggattttaaatttttttttattttttaattttgtgatgttaatttttttttggataaagttttttaataatttggtaagttagtattagttgaattagttttagtttgaattagtagttttttttagtttagttatagttttatttttttagaagggaaaagaagttttatggatttttttataaggaatttttagaatttgttatggtgtttgtaggggatattggtattaattttgggtttattaaatgtagtgggtttaatagtgttttttaaaatgatatgttttaagttttaatttttggaatttgtgaatatgattatatttggaaaatggatttttgtagatgtaattaaggtaagggttttaaggtgagattattttgaatttagtgggttttaaatttaatggtgagtatttttataaaagatagaaaaggagaaagatatatagatagggggagaaagttatgtggagataggggttagagattagagatgatggtgatgtgtttgtaggttaaggaatgttaggaatttttaggagttgttggaagttatgtttgtaagtttttaggttgtggtattttgttatagtaattttaggatatagattttaggaatagaatatagaaaagaaatgggaggaggtttagagtttgttgtggttattttagttattttatttgatttttttagtgttttgttaattttgaagttttttttagttattgagttattggttttgaaaaggagatatgggtgttttggagttggtttagtttggtaggaggtagttttgttttattgtttttttattagttattagtttatataggttttttatagtgggtaagtgtgttgttgttttagtttttgttggttttttttttgtttggttttattagttgtagagttttttgttgttgttttttttggtttaagaggtttatatatttagtttttttgggataaatttagtttatatttgttgttttattgtagttatttaagggttttttttattaatgtgttttttaagggatagtaagttatatggttgttttatttggggttagaattgtgttttattagagtaaggttttggagtaattatatttagggttagggagttatttgtttaagaatagaaatgtgtggttgggtgtggtggtttatgtttgtaattttagtattttgggaggtagaggtgggtagattatgaggttaggagattgagattattttggttaatatagtgaaattttgtttttattaaaaatataaaaaattagttgggtgtggtggtgggtgtttgtagttttagttatttgggaggttgaggtaggagaatggtgtgaatttgggaggtggagtttgtagtgagttgagattgtgttattgtattttagtttgggtgatagagtgagattttgttttaaaaaaaaaaaaaaaaagtgaaatgtgtagttttttttttttttatttttgaaatatgaaggggaggtgattgtaggttttttgggaaagatttttttattttttttttttttttttttttttaagatggagttttgttttgttgtttaggttgtggtgtagtggtgttatttttgtttattgtaagttttgttttttgggtttatgttatttttttgtttttgttttttgagtagttgggattatgggtgtttgtttgggatagttatgtagtagtttttgttttaagttatttttttttatgtagagtagaattaggattatagtaaaggttttagaggaggttattgtttatagggttttgggttttttttttgaaaggtagtttagtttttaagagggtaatagtgattgatttgggatgaaggtttttttgtgtttgtttttgttatttattgtgtgtttttggttttggtagttatagggttattttaggtggattttaaagtggtgttaagttgttggatttttttttttttttattaaattagttatgggaatgggagtatttttggtatatttttagatgtgttgtattggtttagtgttttttttatttttgggttttaaattagttgttggttgttttattaggagtagattgaggggaaatgggtggaagttgtaggggaagagatgtgaggtagataaagaggaagaattttttggttggggtggggttgttagggtttgggtgggagggttgtttattttttgtttttggtggaaggtagtagaagggtgggatggatttgtgtgggagggtttaggtgtggtttgtttgggggtaggagagggattagatgattttttaggtttttttgggttaaagattttttgataaatggttgttgttgaaggtaggagtgaggttttgggaggtgattgattttgaaaaattataggttgtagttttgagggttttaaaggttaagtatggagttttttaaaatgaggttttttttagttttaatttatttatgttttttaggtggttttagatattttgttagggtttttttggtagttttttgtttttgattttggagatagagaaatgtgatgttggtttttggtttgtttatagtttttttgtttttattatagggttgttagttatttttttagtttattgtgtgttttttttttttttttatttttgattttttaataatagtagatttttttttaaatatttttttgtttagattttgggttttatgtatgttgtttttagaaatgtattttagttttttgtgaggagttagtaaggttgtttggtgtttttttttatggatgggaagttttgttggggattaggatttggatttggagattttgaggagtgtgttggttagtgtttgttttgaggtttgggatagagttgttaggtataggtagtattggtgtgagggtttagttttttggataagtttttttttgtttgtttttagatttgttattgtatatataggtggtgattatttttgatttgtttgggtagagaagttatttttttttttttttttgttttattgtttattaggggaaatgttataagtatttaaaaaatgtaaaaaaaaaaaaaaaaaaaaaaaagtgtttaatattaggggttatttggtttaggtggagtttttattaattatggggttttttgtgttgtggttttaaggtgggtagttgatggtttttgtttgagttaatatgagttgtagtttaattataggggatggtgattttagggagtagagtttaggttttggttatagttgtatttaggagttagttgttttttagatttgtagagttaggggagaggtttggaggattggtattgaatgatatgatttaaagtgtgttaagttgggttggaggtgatggtagagttatagtggttatagagtttttatgtgaatttatatggatttgtttggtttaggttttgttgaattttagggtgaggaggatttggtttttatttttaaagatatgaagaggttgataaagaagagttataggtaaaagggggtggtgggtgtgttgtgtaggaggggttgtaattggatgtagaagattttagaaggggtaattagagagaggtagtatttttagaagatgggttgtttggttgttttaaatagtttagggtgtgattgaggggatttttggatttagttggggttttttttgttttgagataatgtattgggaaattttattaagtttatttaagaatttgaaaagttttttggaaatttagtgggtagggtgggtttttgggaggatttttggtatattgtgagagttagatatagtgagggggttttatatttttgtttagaagttttatggtagaggggtagaagtttagggaggagtaggtgttgagattagaggggtttataagagaggggtttggggtagggggtagttgttgagaagtttaggaaatggtgtttgtttttggggaagtgaagttttgggaatagggttggtgaaggggggtgggaagggggaggtgggggtggagggttaggttagattaggtattttttttagtagtagatttatgagtttttggaatttgtttatagaagtgataagtgttttgtttttagttttgtttatatatttatttattaagtgtggtagggatagttgttttttattatttattttgggatttggatttaagtggaggtttttggaggggtagatttaggggaaagggtttttttagaagtagttgttatttagaggatttgagatgagaattttattatgtttttattagatagaggagatttgtggtgtttttgagtttggttttttattttttatttagtagtgttttttttgtttattttaagtttagaatattttgttttttttaagattagttgttgtagtggattgaatagtgatttttaaaagatatgttagagttttagtttttggatttgtgaatgtgataggagttggaatagggtttttgtagatgtaataaaggattttaagaggagagtattttggatttagggtgggttttaaatgtaatgataagtatttttatgagatatagagatatagagaaaaggttatgtgaagatggagtagggagtggtgtgatgtatttatatgtttaggagtatttgggagttattagaagttgggagagaggtttgggttggagttttttgtagaggttttaaaggattagtttggttgatattttgattttggatttttggtttttagaattatttttagtttttaaagtttgtggggttttgttgtagtagttttagtaaattgttatgggggttttttttttttgttaagtttggtatttaaagttttttagttatttggggttaattatattgattttgggatttttaggttatttgtgtgttttatttttttgtttaatttttagtgtttgtgtggttatagttttttttttgtgatatgagttttttgggtttttgagtgtttatttgttttgtattgaaggttgaagttaaattttggagagaattgattttttttgtgggtagggtaggtattgtgtttttagtatagttagagggtattggttgaaatgtgtttttgtaaagtgttttttttatgtttgtattttttttttaagtggggaagttagagaggtttttttgattttttttttagttttttggggtaggaagtttgtggttatttgtttgtaaggattaggtggatagataattagttttttttaggttatattttattaatagagggttttttaattttgttggtggtttatgagagaaggaaaaattgaaggagttgtttatagtaaattttaaatttttgtgttagagaggtttatggttgagtaaggtatttttatttttattgttttgagttgttaatttagtttagtttagtattgtgatttttgatttgtttgtgggttatgggagtttggtttgttaattagtattttttagatatttattttgtgaagtttttagtggttgagtgtttttttgttttttttggatagtgtgggttataggggatattgggtaggaagatagttaagtttttattgtttagaaattgtttgggtttattgtagtaatagggatttatttattagtatgaggtttttttgtaggaggggtgggggtaggagggagtttgtggggtatagggttgtaggaggagttatttttttttttattaaattgtaggttttagttaagttatttttagtatggttgtttgtgtgggaagtttatagttgagggattgtttgtatgtggtatgtaggagttataagtgttatttatattttattttgggttaggtagatgatttttttggttttagttttttgatgaggaataggaagggttggattgaaagattttttttagtttggatatggaatgattttatgagggttatggtgaggtttgttttagttttgtatattagtttgggttagtagtttttaaaggtatagttgtaggggttttggagtagggataaggaggattagtttattttatttttttgggtagaggttaaggattttgtttttggtttatattttttgtggttaaaaatgtagaagtaagtagtgttggtagaggtatttagatttttgggtaaagtaggggttttatttgatattttaggtttggagtatgagaaaattagtttaggttttaggttttttgattgttagtgattagggaatgtgatattttttggtttttgtttttttattttttaattttagggggagattaggttgggtgatgtgtttttttttttgatagtaaatttttatttatttttatttttatttttgttttaagagggggttttttatggttgggtgtagtggtttatgtttgtaattttggaattttgggaggttgagatggatggattatttgaggataggagtttgagattagtttggttaatatggtgaaattttgtttttattaaaaaatatgtgagttggtaattttaagtttttagtagtttttgaatggaggttttttttttgtaggatttttaaattttataaatatgagtgtttgtaatttagttatttaggaggttgaggtatgagaattatttgaatttgggaggtagaggttgtagtgaattaagaatgtgttattgttattttagtttgggatatagtgaaattttgttaaaaaaaaaaaaaaaaaaaggtgggggtttttttatgttgtttaggttggttttaaatttttgggtttaaggaatttttttgttttagttttttagagtgttgggattatgggtatgagtttatgaattttaaaaaataatatttattgttttgtttttgattgtaaaaggaatttaggtataaagttgaaaatttgtaaaatgtataaaaataaagggaaaaaatttataaatttataatttaggtaatttttattaatattttgataaatgtttttttattttttattggggagtgtgtgtgtgtgtgtgtgtgtgtgtgtgtgtgtgtgtgtgtgtgtttaaataggtttatatagtgatgatgttgggtgtttttttttatgtggtgttatgtggttgaggtttttatatattttgggtttgtttttttgatttttttgtagttttgatgttttgattttagatatgttatttttggtttggattgtttaggagaattatttttggattttgttaaaaaatggattgttggtttttaatttttggtggttttggtttaggagggttgggtaagtttgggtattttggagtgtttttggggtgttgtaggtgtgaatttttgtttttttgaagatttataagttttattttttttatttttttttttttttttgagaattttataagaggaaagtttttatttggaggttgttagggatttggagttgttagtttatagttttattttgtttttatttttttgggagttatttaaggataatgtttagttttagttgttaagttttagttttagggttagttatatattgaaggatatgtagaagttgttgtgtgttgggtattgttgaggataaaggtttgaatgataagtgggaataaagttataaggttttaaaatttgtttgaggttttatagttagggttttggaaatttatgaaaaaagttagtttaatattttgttatggaatataggtaggagagggagtagtttttagttagtttttagttagttttttgttagtttttttgtgaattattttattttgggttatagttagggtagttgttgtttttttttttgtttgatagtttttgagggtaggagttagtttgtttattattgttttttttttattagggtttggtattttgtttggtatgtagtagaagtttaagaagggtttattgtgtttattttgtaatagttaatgtgtatgagtgtttattatatttgaagatagtgatttatttttgtttttattgtatagatgggaaattgaggtattgagaggttgatgatttttttatattgttgtgtgggtaagggtaaggttagatgtgagttggtatgttgggttattgtgttttttgtttatattttgttttgggtttgggaaggttatttttggagatttttatgatgttgatattttgtttagtttttttgtgtatttttttttatgttttttagttatttaaagtattagttaggtagtattgttattttggttttgtaaatttagttattgagtggaagagtagttaggttgaagtggggtagaggtagtttttgttagattttagggttgggatttttagttatttttattttttaaggattagtagatagagatttttattgtgtttagttaggggttagggaataggtttttatagtgggggagtgatggatggatgtaggtgtggattgggaggatttgggttggttttttagtgttggagttttagtagtttaatttattttgttgggtttttgtggggattaaaagatattttgtatataaagtattagtttagggtttggtatttaggaggtgtttaattaaaggaaatggttatgaaaaataataaggagaagtttagttataggaggtgtttgtgggtaaggagagaatagttggaagggtttggatttgggttagagataaagaatgtaagagggagggagggagagaaggagggagggagagaaagagggagggaaagaaagagggagggagagagggagggtagggtaggtaatagttggttttagggtagttgtgtgtaggagtttgttttattatttaaatattaggagagatgtaaatatttgagtgaggtttttttagtttggttttgttgtggttatagttagggttggagaaagagttttttttttattagggtttttgttttgtgttttttattttagttgttttaagattttatgtttttgggttaggagtaggggtttgagagtagtaattaggtagggtagtggggttagggagggattttgtttttgtttttattttttttttttgtttttgtttttatttttttttttttgtatagtattgggtttgtaaaggtgtgaatgaaggatttttttttttatttgattttaaggggtttaggtggttaagggttttttttgtagtttagaaaaaaaagtaaagtagttttttttgaggttttttggtggaggtttagggtttaaagtttgttgttataaatttgtagttttttttgtttttttaatagtgttttttttttatttgggttattttattattttggttttttttagttttttaggttttttggggaggaggatagatgtagagtttggattttgtgtgtagtagggtttttttaatgttgtggtgtattttgtttggttgtgggagtttgttttatgttatgatttgtgttggtattaatagtttttttttttattttttatttgagtgttgagggtagttgtgttaggtatagatatatagttttttatatatattatgagtttgtagaaatggtaagagaaggttgagtgtagtggtttatatttgtaattttagtattttgggaagttaaggtgggtggattatttgaggtaaggagtttgagattagtttggttaataggatgaaattttgtttttattaaaaatataaaaaattagttgggtgtggtggtgtgtgtttggagttttagttatttaggaggttgaggtaggagaattgtttgaatttaggaggtggaggatgtagtgagttgagattatgttattgtattgtagtttgggtaataagagtgaaattttgttttaaaaaaaaagaaagaaagaaaaagaaaaaaagaaaaggaaaatggtaagagaagttggttagtattatttgtttggtaaatttttattttggtttttggttaggaagtttttttttaggaagtttttttgttttatttttttttttgagtttatgtttagatttttagtgtttagaatagagttggtttttggggtatttatggatggttgttggataaataaataagttaattgttttttttatttttagtgatgtttttggtttggtagggtatttagtagtaatgttttttgagtggattttaaggagtattttttattgtgtagtttgtattagggattttagttttttattttaaattaaaggaaaaaatttaattttagtaaatatatagagtattttattttttgatttttaatggggggtaagaggtagaggatagaggagaagattatttttttaggtttggtttggagttaaaaagatttgtatgtttttattgtagataatattggtttttgggggatatagggtaggggtttggtttgttttttgtagggaaattgtttatttatgtggaaagtggggttaagggtttttgtttggaattagttttttgtatatggggtggggggtggggatagaaggagattttgtttggattgtatggaaatttattagattgttggttgttgatttggtaggagtagagttatttttattttttagggttttgtttgggggaggggagaggttaggtggttttgtttaggttatattttttatggttaggaatgttttttttttattagaaagaaagatgagataggtttattttgaattttttggatataggaagggggtttatttgtggtttaggtggtttttttttttatatttaaggggttttataaggaggtgttaggatttttaggttttgttttagggaattgttgtttgtaaaggttataggtagagatagttaggaatgttttttatgttattggttatgggttggaggttgtgaaattaggtatagaattagaaagatttgttataggttgtaaagggttttagagagttttagttttttagaggggtagtattgtagaaggggtgagaaggaaaaattagtttttaggaattgtttatttagagtttatataatatttaggtggtatgagataatggtttattttttattttatttttttgttgttttttaagatttgagtttttgggggtgtttttagtagatagggggatgtggggtaattgtttttttttaattgtatatttggaggtaatttatatttagatgatttttttgaggttgtgattagagtttggggtaggggaggggaagtgggtggatgggaaggtgagggagatttttttaggaaagttgttttaggtgtttgtaaggttttattgtttatatttaaggtataggtttttggttttgaggatataggaaatttgatgttatgtggggaggagggtattgtaatgtatttaaggttaggttttttgattttttggatattggataaatgatggtttttttagttggtttagagatgttaggagtgatagaatgttaaaggttgtagggggatatttagaaatttttgagaaagaagatggataaggaaaaataaaaaaatatgagaagtttagtagagtttgagttttgtatttttggttttttttatggttatgggtaattttttggagatttagttatgggagtagtggaggtaggtatgggtgggggggggggtgggttttattgtttatggttttggttgatattgaggttatttttttgtttttttaagtttttgggtattggtaggatttttaaaaatgataataaatttgaagtttttagaattgtttgttggtttagtttaaatggagttttggggttttgtagattaaattaaatagtttgagtttagaaatgttttaggtgtttgggggtgtttaggggttaattggtgggtttgtttggttggagagatgataaatttttttatttttgggattgtgttttagagagttttggattttttggttttataagtaatttagagtttttaaatttgggaaaaattaagagggttttggaaagaaaggtagtgtttgattatttttttttagtggttttgttaagggagagtataggaatttggtttttggttgggtttttgggatgaattaaaataaaaagaaaaagttgggggagggggtggtggaattgtttggggttttagtttaggttatatattaaggagattttagaggagtaggttagttttatttttggtatgatgatggatgggtatttggttggttggtaaagggaagagatggtaatagtgaggttttgaatttagtggttaagatttatttttgagtgtgattttttttgatgtttgggtatgtaagaaatgggaggtggagaaaggaggaggagattttagttttgtttttttggtattaggttattagggaatagtattttttttttaatgggtaggtagaggttataggttgttaggttgagaagtttttggtttttatagataaatgtatagtttgtatatttgtattattttgggtgatgtttattatgtatggttattatgtatgttttttattattaagatagttgatgagattaggtggttattgtgtattgggtattgtggtgattgtttgatattgatttttgggggtttaggtttttggtgggtttgtttttttaggtatttagttttttttttattttttgatattttgggtttagtgtaggggtatgggggtgtttagtggatgggtttatgggttgggtaagtagtatgtagttttggtttattagtttttggttttattattagataagatgagattgttttagttgttagtttagttttgtattatatttgattgggtttttgtagaggtttgttggatgagaatgtttagggtagtaggtattattttttgggatgtatattttgttataattgttttttagggaaaggttagtttgtagagttgaatgtaggttgttagtgtttttgttgtttttatggtttggttatttagtaagtgtttattttattgttagtgtttggttttgtagatgggtatatggtttatttatttgtgatattttagggtgggggtgggggtagatggtggtagggaagattaggataattttttagtaagaggaatttgtagttaatatgatgttagtttttagaatgttagttaggtaggaaaaggggggttttatggttgtattgggagtttgagtatttgttgggtttagagggatttttaggtgggtgttattggtattagtgtttgttgtgttttttataattagtggtgattatgttgtttggttttatttatatagtggtattatataggtttttgtttgagattttttatttttagatttgtatatttaagtatttaaatttatttgttttttgtaaatgttttttttttttgtttagatgttatattagttgtgatatttattatatttgtaggaggtaggatttgtgtttagtgttatgggttgtattttagagttttttagtaatttttaaagagagttgtttttaattttattttgtaggtagggaaataggtgaagaaattgaagaaattgaagttgtttagttttttaatggtagagtgagggtggtttgggtatttttatattgttatattttttatttttttaaagtattgtttttttggatgtaaattttgtttattagttttatttaaaatttttttggatagttatagtttatagaaagtatttttagtttgtagttatttagttattgtaggggtgttttggtgtttatttttatttgtttttttttggatatttagtttagagaatttatagttttgttgtaaggttgattatagtgtatttgttgtttgggtgttgtgtttgtttttttttaaatgaattaatttgtagttgggatagtgggtttgtttggttttgggttttgaatttaaagagtattaagttagtgttgttagtggttgtgggatttgtgtaagaggtttgtttttattttttatggtttttgttttttattataaaagtttaaattgtagagaggtagtatttataggatgttttgagttttggttgaaaggtagggtttattatgtaagaggtttattggtattaattagggataggtttgtatttattattaagtaatggggtttttttttttagagaggaaagaggtatttgaattttgttagtgtgttagtttttatgttttggaggtgttgggatttttagataagaaggtatatttatatggttttttttatttagaagtttgttttatagtttgttttgtttttagaatatagatttgggggttttttttgggtgatagtgggggtttgggagaagtttagatgttatatagttttgggatttgagtatgtgggttttgggttagattgttttaataaatattaaggatttttggatttttttttggtgtgtaaatttggttatagtaaatattgttgagtaaagtaggttaatagttggtatttggaaaggtttttgttatataaagatttgagttgtaattgtgtttgtgataatagatttggtttgaatttatgaaagtatatgttgtttgttagttttgtgtttttattaattagaagggagaaagaggaaagggttattttttttgttattttattatgggtagtggtgggtgttgtagttgtttggaggtttgtttgtatagtggaaaagtagaaaatgagattttaaaaattttattagttaaatataaaatattttttttgttgttatgtggtggtttttatagagttttaaaattttgaagtttggagatttattttgaagggggagtaaaggtgggatgtgggaagtttgagtttatggaagatattgatattttttttatttttgggaattttgagtttgaaggatttggtttgaatagtggaaggattgaatttttgtgtaatttattggtgatggaatataaagttatggtgtttttggtttttaagatgggagggatggggaaggttttgggtgaaggggataggtggggaaggaaaaggtgaagagaaaggtgttttttagggagggggtagatgtgtttaggatatgggatattggtagaattttaattttgagtatatatataggtttatggatggttttttgtttatttgttttttatgggtgtgttgtgttggtttgggtatttgtttttttttttatgttaggttatttgttgtttattttgtatattgttattagttttaagttttttagaatattttgattagggttttgtggtttttgttataggattttaggtttagatgtttgtttgattggaaaattgtttttagagatgttgtggtttagagtttgttttgttttggggtggtttttggagtttttgttttttagtaatttatatggtgataggtatttatatttgttggttttaggaattttggggttattattttagtgttgtaaggagttggtagttttttttttatttttttggtttattttgtaggaattaagatattaggtgagttgttttgggaaagagatttgtgtttttatggtgttgtttttgtgtttatttttagttattttagatgttttttgtggattagttgtatttttggtgggtatgtttggttttttgtagtttggtttatatgatttttataggtaggtttttttttatgttttagttttttttttagttagtttattttagttttttttattgttgttggttgttgttggttagaaggttttttttttttttgtaatttaatttttatttttttttaaggtttgttttttttatattgattttttttttgttagttagtggtgatttttttttattttgatttggaagttgtttgtttatattatttttggttgggttgaattatatttttttttttattttttttaattattttttttttatgtttgtttgtttatttaaggttgtttaatttttatatatatatttttatattttttaattatattttaggttttttgggtattagggagggttatttttttatattttaggttagtttttatgtatatgtgtatttatgtatatatatatttttttatgtttattgatttgggttatttgatggttttaagattagaatttttagtaaaattatttaggatatataagggggagattgataaatatagggaattagtagattgaggttttattttttgagattgagaaatttttttttagagttaaaggattgttaattgttgtattaggatggttttaatgagtttattgttttggattaaattatagggttataaaattggtttgggagatagttgtagaagtagttttagatggaggtatatgggggtaagggtggagttatatttagagatttaaggaaggggtattaataatttttatagtgtaaatggtgatagttgtataatgaatataattttaaattttggtttttttttttgttatagggtttttgttgagatatgagagtttttttttagaaattttattgggggtttgatattttttgttaggaattgagagtagagattttgattttgtaggtaggaggagagttttgtataatatagggtttttttttataagggtttattggaaagtggttagattggttaagttgtgttatttggatatttgggataaggaaggtttttggaggagtggttgtagggaggagttgtaaagaggtaggggtagggaggttatatttatttggggattgtaggaggtttaatggaatatagtggatttagggagattttagtatgagtatgtgtttaaagatgtttagatgaggaggtgttgtgggggaggggggtgggaatagtaagtttttttagttttgtagatttagattttttttttttttgggaagtagggatgtaaagggatagagtttgaaaaagggtttttattattaagttgataaagtaattatgatgtttttagtttatattttgtatagtgttagtggttattggattataatttttttttgtttttttgttgttttatattttttttaggtttagttttgaagaatagttattggtattttgtttggtgtttagttaaagttttggttttttaggaggttttgttttttttatttagatagggttgattttaggtgggttgtgtgggtagttgggtttaggatatttagatgttagttttggttttggttatggagtggggaggattttaggttggttattttttagtttggtttgatatttggatagtttgtttattttaatatagttttttttttttttggtttattagagggttttgtttaagttagtttaggagtttttttgaggggtgggggttttaggttttggtagaggtaggtttgttttttagaagttttgttttagagtgttggagattattgtgtgagttttttttttgtttgttgtatttatttttgtggatgtaggatgtagagttttagtattggtagttaagaggatgtaggaaagtgtatgtatttataggtttagagatgtggatgttagatttaggtttggatagagtagttttgtaagttttaatatattttgtaaattttgaagataggagagagttaaaatattttttttgtttgtatgtaggttttttttgttttttatggtttgattttgggaggtggatgaggatatttttaggtttggatgggggttatgggatattttattttagattttgttatgatttgggttgtgtttgtttggtgtttttggtttatgggttgtataatttggtggttttgaaattggtgtgggggaggggagggttgtttatttgagtaggatgtggttgtttatttagttggaggtgaggaatgatttttttattttgttgttgggtttaagtggggtttgagagttgttggggagagttaaagggaggggattgatggattttttagagtgaaattgtgtgttttggagagttttgaggtagttttgtgagtttttgaggaggttgttgttgtttggtaaatataaataataataaaaggaaggaaatttaggtggtagtgtgtagaatgagtatagggttttgtgagggtgtgtagggtttatgtgggtgtttttaatagggttttttatgtaggtggtgtgggtatggggttgggggtgtgtggtgtttttagtgggagggtgtttggattaggggttttgtttttttttagtgtatttttgtttttttttagtgtatttttgttttgtgttaggtttatttgtagggttttttttagtatgtttgtggttgtagtagttagtttagtatttatttttgaagtttgaaatgattttatttagttgtgtgttgattgtggggtttgatatgatggttggtgggtagtgggttgtgtggagggtagtggtgaggaagtgtttttggtggggtttgggttttgtgtgttggttggggtgttgtgtttgtgtttttgtagtgtagagttagttgttggaggagtttttaggttttttggtttagttgaatgaatgggggaggaaggtgggtgttggtttttttttgtgtgttgtgtttttgttttgtttttgttttttgggtggattaggtttttgtatttgtattggtttttttgttttgtattggttgttttgtttgtttgttaaggttaggtttggggggttggggtttgagtggttgttgggggatagttttgggtatatgattggagtgttttttttttttttgtttggtttgtgtttaggggatggtgagagatgtggttttagtttttttttttgggtgttttgttgtggttagatgtgggtggatgtggaggttgggttatggtgaggagggtgggtgtttagaggggaagagatttttttttttttttgggtgtagggtttttttgtaggaggttgtatttgggtagttaaataaagttttttgttattgttgttgtgtgttttgtgtttgtaagggttaaatggtagtgtatgtggttggtaggtaggattttggtttgtgggtttaagagttgaggggtgtagggtgaatatgtgagttttatggtattagtgagaggttattaatttttatttattgagggtatttttgtagttaatatttttattatgattattgttttgggggttattgttgtatttttttgggtgagttttggagaaggtattgtttgggagaaggggtatagggtggggatggaatatggttgttagagaagttagggatgggtgatgtttttttttttttataataagggttttttgagagtaggaagtagattttgttaggagtagatgtttttgaaggaaggtgtgaaggaaggagttaggtagtgagtgagtagaaagggagttgttttaagggttttttttttttttttgggttttaatttgaggtttagttttttttttaggttagtggtttttatttttaaattatattatttataaggtaggtagggttgaggggttggggtagatttggggatttgggttagatatagaatttgagaagtaataggtttttatttttaagaagggttttttaggtttgttatttataagagagagaggtgttttttttatttgttttggaaagttagaaatttatttttgtatgttttttttgttattttgttttttagatttttggtttttgtttagagttaggggttatgtgagaatttatagtatggaataatatttttatttttgaagtagtaggttgtaatgttataattgtattttggttttttgaatgtgtggttggggagtgtttgatagtttattttgggtttgaggttgtttgttgtttatttgtttttttttattttttttgaaatattttaaatgtgtaggagtgttgagattttttagttattttggagaggtggggggtagggggttttttgtggaaaatgttttaggtttgggtggttttttaagtagatgaaattaagttttttttttttaagaaaagtaggtatttttttttttatgttttggatattttgaattatttttaattaagtgagtttgtggatatgggaattgtaaaattatagatattttagatgtgtgtatatttttgttggtttgggagtttgggttttagaaatgtagttattgttgttattaatagtattttgtattttttatgttaggttagggtatgttttgtttgaattttagtatttgggtttattggatagtttagtttttattgggttatttgtttatgttgtatttggggatttgggggtttagtatttaagaaatttagtttaataatatagtttttttgggaagatgttgggtttggtataatagttattttaagttatagtattatttttgagtgtttttttaaaaagtatttggtgagtgtggatatatttatgtaattgtttttttttagggttggtatggagttttattagattagtatagggttagttaattgtatattttttatttttatgtatagtgtagtaaatatatttagttttttggggagtgttgttagggtgtatgttttattaaaatgggaatttaagggataatggtaggagagtagttagaaagtgtgtatgtttttgtgattgtgtttagagtttattggttttagttttagttattgtttttttaatgtaattatttagagttatatgattaggtttagaaatttttaggtaaggaggttttttgagtttttttaggaaatttaaattagggtttggttatatttttagttaggaagtttatttttgtatttaattaattgttttaattgtatattatttattttttttttttttttgtttttagaggagatgggaaatagttgggtattattttttaagttataattattttttttatatttaaggataatttagttgttttttggtttttttttttttagtttaaattatttttttttagttttttaattatattttgagttgttttttgattatagttaagggttgggtttagtttggggttttaggattttaatgaggttttattgttataggatagtgaggaggttttttattttttttttttagggttttagggtttggatatatagttttagaaggggtattgggtagagaagatgtatgttggtagtagagaggaaattgagttgaaatttggtaagaataaaagaattataaaggtttgtgtatttagtaaggtgtatttttttatggttataaaagaaggtaagattgattgtaggtttggttaaagggattgtttgtgtttttagtgtataatgagatttatagtgggttggtgattttttttaaaataaagatatgtttatttggaattttaaatgtgatttgattttgtttaagggtttttgtagaaagaatttaggtaaggattttaagataaggtgggttttaaatttaatgttgtgtttttttaagagatagaaaagaaagtatagagatatagaaaaaggttttgtgaagatagaggtagagattggagtgatgtagttataggttaaggaatatttggggttattagaagttggaagaggtaaagaaaggtttttttttggagtttttagaggaagttggttttgttggtattttgattttagatttttggtttttagaattgtgagaggatatattttttttgttataagttatttagttttgatagttgttatagtagttaggagaaatttgtgttttatttttatttgtattatgttttgaggttaaagttttatatagtaaagatgtttaagtaattataaattttgtgggtagtttatttgtttagtagattattgttttaagggaagggggatggggatagggaagagagttataggaaatttttgtatgtttttttggaaatgggaaggagtaggtttggagagaaattttataggttaggttttggggaaatgaagtttataaagtgtgggaatggagtggggaggaaatttatgaggaagtagtgtttggtgtatatatttatatttatgatttttttttaggtatagtttttatggagaggtttagttggtagggaagtaaaagaggtttggagagtgaaggaaggtgaggggtttttttttagtaatattgaggttttagatgggatattttattaggtggtaggttgtgtttttatagatagagattttttaagggtagggtttagatggttttatttttgtgtggtttgatataaagtaggttttttagagttgttgagttttgggtttgttagtggtagagttttttatagttttttaagtttttatagttttttattttaggaaatggtgttattatttatttagttgtttaagttaagtttttgggtattattgttgattttttttttttttttatttttagtatttaaattatggtgtgtttttatttttagtttttttgtgaattagtttgaattttttttttttagtagtgtgttagttaatggttaataattggttatttggggttagtaaaagtaataatatttagttttttgatttgtagtgtttgtttatttttgtggtgttaatatttttgttttggttaattttttttttttttttttttttttgatagggttttattttgttatttggtttggagtgtagtggggtaattttggtttattgtaaattttattttttaggtttaagtgatttttttgttttagttttttaagtagtttggattataggtatttgttattatttttggttaatttttgtatttttattagagatgaggatttattttgttggttaggttggttttgaatttagatgatttgtttgttttggttttttaaagtgttgggattataggtatgagttattgtgtttagttggttaattttaagttatttgtatgatattattggaggtgagattgagaagagatgtttagttattatgaatatagtgtttttattatataaatataattttaagaatataattgtaataggatagataatagttaaatgttgtaaaaaatttaagaggtgatgaaagttgtgtatttattattttttgttttaaatataattatttataagtaattttttaatgttttgtttaattttttttttataatttgtaatttaatttatattgtaaaaatttattatttttttaatagagtaatgtatttttattgtgataaaatatatgtaatataaaatttattatttttggttagttattatggtttatgtttgtaattttagtattttggaaggttaaggtgggtggattatttgaggttaggagtttaagattagtttggttaatatggtgaaattttgtttttattaaaaatataaaaattagttgggtgtggtggtaaatgtttataattttagttttttgggaggttgaggtatgagaattgtttgaatttgggaggtggaggttatagtgagttaagattatgttagtgtattttagtttgggtgatagagtgagattttgttttaaaaaaaaaaaaaataaaaataaaaaagataaatttattattttaattaagtttttatgttagtgatattaagtatatttatattgtatatttattaatattatttatttttgaaattttttttaattttttaaattgaaattttgtttttattaaataataattttttattttttttttttttagttgttggtaattgttattttaatttttttatgaatttgattttatataagtgaaattatataatatttgtttttgtgagataggtttatgtagtatgaggtttttaaggtttattatttaaggtttatatgtagtgatagaattttgttttttttgaaggttgaatgatattttattgtgtgtatatatattttgtatatttattttttttatatttgagtaattgagagtaaagttgttataaatatgggtgtgtaaatatttgtttaagtttttgtttttattattttattattattattttatttattattagtattattattattttagatagttttattttgttgtttgggttgtagtgtagtggtgtgattttggtttattgtaatttttgttttttagattggagtaatttttttgttttagttttttgagtagttgggattataggtatttgttattatgtttggttaatttttgtttttttagtagagatggggttttattgtgttggttagggtagttttgaatttttggttttaagtgatttattttttttagttttttaaagtgttgggattatagatgtgagttattgtgtttagttattattttagttttaaatattatagtaatttttttattgttttatgagattttttgagatagtggttttagggattttatatatatttgtttgattttgtgtaatgataaagtgtagttttttttgtagaatggtagagttgggagatttttgatggggtatgagtttaaaggggtagaggggatgtttagaatatatatggattttttatgtgtgttttgttagttattaagtagatttgttttagttttgatatgtttaggattatagatagtgtatggtttttatttgggttaagtttttggaattttttttttttttatattatttgtattgggagtagttattaggttgtggattattaagttttttttaggttatttgagtttgtatttttttatttagtttgattgagttggtgtgtagttattatattttattatattttttgtttggttgttttaatgtaattataaggttttatttaaagaagtatatgattaatttgttttttagattttttagtgatttttttagtttgttttgtgtagaatatttatagtaaaatttgattatagtggtttgagtttttatttttaaggtaggggattttttaaataaagtattagtgttttaaatttatgattttttaaggaggtttttggtttttagtatagtaaatgttttgttttatggttttttggttttttatttttattttatttgagttttttgttttggtatttgggattgaattagtttggagttttttagttttgttgtttgttggttttgatgatattattagggattgtagtattgtttggattttttgttgttatattttattgtaataatatttaatttgatggaattttgggagtaagtggtaggggtagggatggtggtggttaggggttgtatatatataggatagaaggattgaaggattgggtggaaagtatgatttttttaagatgatttttttttagtagaattttggttgtgttttttgaatagtatttgtttatttgtatatttggtgagttttgtgattagtaaatttagatgtttgggaggttattagtggttttgttgaggtataatttagatatgatagtttatgttttttttttgatttttttttttttatatagttttatgattagagtgttttttttatttttgtttttattttagttttgtaagatatagttgtgaaatggttaaagtttttaattttttagtatttgtttgagattggagtataaaaatgagatggggatatagtattttatggatattagtgatggaaaaaaattttttgatttttttgggagttttgtaaagttatattaggggataagaaggagtggttagtttggtattgatttagttttaaagtagttagtgattaaagtatatagttggtatttttttatttttagggtattaggaggtttggttagaatttatgttagttaggagaaataggttgtttttggggtttttggtgttttggtttttttattgtttttttgaagaaggtattttgttttgtggggtttgaggttggaggtaatttgttattgatgtagtgtagggatgagggttgagttattagtttgttttagttttatgttagtaggaataatagggatttaagtagagaagaaagtatttatttttaaagttattatagtgattgaggtgatgtggtttttagggagtttttttttttgttggttttttgtggattgtggttttatgttttaataatgtttttgtttattttgtaaggtttagtaggtggaaggaaagagggtggaggttgggagtggtggtttggtaatttgggaagggtagggagtaggaatatgtttttttttttttgtatttgtttagaaggttttatagggtttgttttgttatttataattttagggagatttttttttaatgtttgttttataaatgtttatttattttatatttgaatatttttagttatagggagtttagtatttatttatgttatttattttatttttggttgtttaaaaaagaggaaagagagagaaagaaaagataggaaagatagagaaagggggaaagagagagagaggaaagaaagaaagaggaaagaataagataggaaggaaagaaaaaggaagggaatggaagggaaggaagagagggaagaaagagagaaagagagagaaagaggtataaataaggtaggttttatggagtagagatttaataagggagtaaaatatatttgtagttaggttgtagatggatttttataggagtgtatatttattttattttttttggaatagaaaagtggaaagaagatgtagtggtgtgggtgggtggtggttttttttgggggtttggaatgtggggtattagtttttttggttttgagaaggagattaagattattaatatttatagtggagattgaattatataagggttggggatattgttttttttgtatttttaataaagatttgatgttttaattatgggaatttgtggaagaagaaataaaattggttttggggttttttagagaattggttttttatttagtggtggttgtgaagaaatttttggagttagttttagtggtttgggtttgtatagttgagattgtttttggaagttgagtggaagtggggagtttttaggtatagttgggttttgttttttattttagttagtagttttaggatttttgggtgttttagagttttttttagagggtaaatttagagtatgagggagtggggagatgtttaatattgggggatttttgtttgtttttgtttttagttttgttgatttgaatagggaggttatgggtgtttaggggtagaattgtgggttggtaagtttttagttttggtttttttttgtttttttttttttattgttattgattatttttggttatatgttgatatttttataggatgatggagaagagagaagaggaatttttttgttttgtttagtatattttaaagaggttttagtgtaaaggtattgatgtttatagttaaatgtgtgtgggggttttttaggagtgggatgtttttattttgttttagattgttatgaattgatagaaggttttatgttattaaatatattttattaataaattattttaatatttagtaaaaaaataaataaaaatgtatgtattttgtgttttgtagtgtttttatgttgtatttttttttgtatttgagttttggtttgtgtttttggtttgttgttttgggaatagaatgttttgtgtgggaggtagataggaagtgtggggtgtgttggttgggtttttttagataatttggtattgttttttttagataatgaaattttttttattttgagtgtttttggaagttagttggtagttagattaatttaaatgaattatttgttttttttgtgaagtgattttagggatttaatgggtttgttattaatatagttttttttgtattttgttttttttttttatttttttttttttgtatgagttattggttatgatgatttggtttagttaagggatttggttagttttggttaggttatgtgagagatagtataaaggattaaggttgttggaattaggttagaggttgagggttatatggattttttggagtgtttgtaattggggatttttaaggttgttttttggttttggggatttgtttatttggggatagttttaagggagatttttaaaagtagggagttaaaagggtgaattaatatagaaatattgagggttagggagaatttgaagatgggtttggttgggtatagtggtttatgtttgtaattttagtattttgggaggttaaggtgggtggattatttgaggttaggaatttgagattagtttggttaatatggtgaaatattatttttattaaaaatataaaaattagttgggtgtggtggtaggtgtttgtaattttagttatttaggaggttgaggtaggaggattgtttgaatgtaggaggtagaggtggtagtgagttaagattatattattgtattttagtttgggtaatagagtgagattttattttaaaaaaaaaaaaaaaaaaaaaaaaaagataggtttaaggtttggagagttagaagttatttttttatttttgggtggtttattttgagattgtattatgttagagaaagttgtgggagtgtttgtttataatttataagtaatattgttttttttttttattagtttttggttttagtaggtttttgatttgtgttttttttagggttttgggtttttttaagttggatttttggttgttggtgggatgattatgtgatttgttatttttttgtttattgttttgggtagtttttgttatttggtgtatatagagtggagtttagtaaggttggggttgttgattttttgttagttatatttgtttttttttatgttatttttttttgttttggttatgtttaggggtttatatttttttataagttaggtgttagatttttgtgtttgttttattttgttttttttgtttggtgggttttttatattttttttggtttgatttaggtttgatttgtttttaggttttagtttagaggttgttttttttaggaagtttttttgggattgttagatgaagggatttttttttggattttttttttatttttatagttttaggaatagtttttaatttaggttttattgagttagtgtggtatttaggagagttataagtgtgtgatgaatgtgttgaagtttttttaaaagttgaaggagttttgtgaatatatagtagtattagtttagattgtgaaggtataggggagttagttttttttagttttgtttgtttttggttttttttttgaggaggtgggagttagttagttgggattaggaggtgggttttatggagtagagatttaataagggaataaaataaattagagaatttttttgttgtaaggaatttagataaggagtatttagttagaggaggaaggaagagattggtagtagattttttttgttttagtagttttgtaagttagatgggttaattttttagtatagttgttttttagtatagagaaattttttatttttagtaatagggtgggaatatttttagatagggttatggttattttggttatagggattatggagtttgagtttttgtggtttgttttatttatgtggttatagattttgagtatatatttggagttatagagtttaaagggtagggtagggtagggaatttgtttgattggtgaaggttattttattatttggagtataggtttttgtttttaaatttatatggagtttttgatatggggtattgattttaaggaggtgaatgtggatatttaaggttagtgaatggttaggtgttaatatattgataggtttttggttttttttttaatattgagggtaggaaataaatggggtttatatggtgtatatggtttttagagttagtaaggtgtgtaagatttggtagttgagaaaattgattatttggttgggtgtggtggtttatgtttgtaattttagtattttgggaggttgaggtgggtggattatgaggttaagagattgagattattttggttaatatggtgaaattttgtttttattaaaaatataaaaaattagttggatgtggtggtaggtgtttgtagttttagttattttggaggttgaggtgggagaatggtgtgaatttgggaggtggagtttgtagtgagttgagatagtgttattgtattttagtttgggtgaaagagtgagattttattttaaaaaaaaaaagaaaagaaaagaaaagaaaattgattatttgattatgaataagttagaatatttatttagaaaaaaaaaatagttttgtttaattggggatttaaaattttaggatttatgttttttttttatagagttatattatttttttaatgtttatttttgattttatttgtttgttaagttttaggtatttagaatatagtatgatagtaagttttgtgatttttataggtttttttaatttattttaggtatagttatatttttagttttgagtagtagggagtgatatgtagatggttatttagatagagaaagatttttaaaaggagggtaggttttgttttgtaggtagtatttattgatatagatattagtaggtaaattttttaggaagatttttattaagaaagaatgaaagaggtttagtgtggtggtttatgtttgtaattttagtattttgggaggttaaggtgggtggattattttaggtaaggagtttgatattagtttggttaatgtggtgaaattttatttttattaaaaatataaaatttagttggatgtggtggtgggtatttgtaattttagttatttgggaggttgaggtaggagaattatttgattttaggaggtagaggttgtagtgagttaggattatattattgtattttagtttggggggtaatagagagagattttgttttaaaaaaaaaaaaaaaaaaaaaaaggatgaaagataaataaggttgaaattggtaggttggtatatttttaataatttattttaggttgggtgtagtggtataatgttagtattttgggaggttgaggagggtagattgtgaggttaggagattgagattattttggttaatatggtgaaattttgtttttattaaaaatataaaaaattagttgggtgtggtggtgggtgtttgtagttttagttattttggaagtttaggtaggagaatggtgtgaattagggaggtggagtttgtagtgagtggagattgtattattttatgttagtttgggtgatagagtgagattttgttttaaaaaaaaaaagaaataaaaaataaaaataataaaaaaaaaataatttattttagtagggagtaggaggtaaggtttgatatgtagtgtttgttaatttttgtggtgtaaatatatttattgtggtaaattttaagttataaataggatattattaaatatagagttgggaaaagatatgtatattattggataaaatgtttaggtagttatggtttatttttttttgggaaggggggtatgtttagaatgttttttattatggagaatgattgtggtaaatagggtttaattggtaggttgatttaattaattgtttattgatgtgatgtggggtaggtttttgaggttgtttttatgtttagggaagaaggtggttatgtggttatagatttggttttgggtttgttttttttttttttttttgagatagagttttgttttttttttttaggttggagtgtaatggtgtgattttggtttattgtaatttttgttttttgggtttaagtaatttttttgttttagttttttaagtagttgggattataggtgtttattattatgtttagttaattttgtatttgtagtatagatggggttgttggttaggttagttttaaatttttgattttaggtgatttatttattttggttttttaaagtgttaggattataggtatgagttattgtgtttatttgggtttgttattttgaggatatatttggagttatgtgtttatgattttttttttattttaaaattttgattttattttattgtttttagagataggttttgttttgttatttaggttggagtgtagtggtgtaattatagtttattgtagttttgaatttttaggtttaagtgatttttttattttagttttttgagtagttggggttgggtttataggtgttattatatttagttatattttatatttttttgtagagatagggttttgtaatttgtttaaattggttttaaatttttggttttaagtaatttttttatttttagttttataaagtgttgggattatagatgttagttagtgtatttagtagttattatgattgattggtgatgtttgttttagttttaggatgaaagagtagtagtattttagttaagtatttgtggtttttgattggaagatgttttttttgttttttaagtatagtgtaaatgttatttttttggtaagtttttttttaattttattttttttttggtatagggtttgttatagttttgtttatataaagagagttattagtgtatgtggtatagatgttagttgtttttttaatatttgagtttttttttttttatagtaattgaagttttggttgtgtatagggaagtttagttgaagaatatattgtttagtttttttgatgataggagtggttatataattgggttttggttagtgggaaggagttgaagtgtttaatttttaggttatgtttttaaaaataaagagggatatttgttttttttttttttttttttttttttttttttggttggagtgtagatatgatggtaggagttggaattattttagtttaagagatggaagttgtgtgttgaggatgtattaaaggaatgaattaggtttgggttgttttgggtttttataatgattgatatttggattgggatgtgggtttgagtgttgtttagtttttgatgttttagtttttgttatatagttagatggtgttttgattaatttaaggtatggttattattttatttgtttggtagggtaggggttttatttttatatgttgagtttttggtagaatttggtgtaatatatatagttaaagtaaaatgaataggttattttaattaaggtttattttgtgggttggttttggtatttggttttaatttttattttattttatttatttattatttttgagatagagttttatatttgttgtttagtttagagaggagtggtgtgattttggtttattgtaatttttattttttaggtttaagtgatttttgtgttttagtagttgggtagttgggttttttttgagtagttgggattataggtgtatgttattatgtttggttaatttttgtattttttgtagagatggggttttattatgttggttaggttggttttgaatttttgattttaagtgatttatttgttttggttttttaaagtgttgggattataggtatgagttattgtgtttagttagttttggtatttggaattggaaaataatagtttgagttttagaggggataaatataaatatgaggtagaaggaatagtaagtaaatatgtgtttagagtaggttgggttgtttatatttttaaaatattgttaggtgttgaggtttgggttttgtgttagatttttgggtgtagattttgtggggatatttattgggtagtgggatttttggtaagttatattatttttttgagtttttgttgattaagttgtttattgagaataatatttagattgaaaggatttataataatatgtgaaaagtgtttggtttaaaataggagtttggtaattggtagtttttattatttataatatatagtttaatgtttttgttttataggaatgaaaataggatttagataggtaaaatgatttgttgagggttgtatagtgttaatgatagagttaggattagggtttggggttttgattttttttgtagtattttggttttgtgagaagtggttttgggtgaatataaggagtgaggagttggtgagaaattttgaaaatgaagttgggtgtggtggtggatgtttgtggttttagttatttaggaggttgaggtaggaggattgtttgagtttgggagttggaggttgtagtgtgttatgattgtattattgtattttagtttaggtgatttagtaagattttattttagaaaaggaaaggaaaggagaggggaggggaagggagggaatttttgatagtgattttagagataattaggatgatttgaaattattttgaaatgtattaaaaaataaaaataaaatggatttatggttaggtgaaggagggatagatggatggtgaggtgataaagtaggtgtagtttggtgttagtggtagaatttaggtgatggttgaatgtgttttttgtaaaatgtttttaatttgattatgtgttttgaatatttttataatagaatggagggaagagaaaggtaagagggagttattgtagttgttgtagtaggagtagattttaaaatattatgtattagatttttagttttgtttttgtggatgtgtttttgtttttttttttgggatttaaggatatttaatgagtgtatgtgtttttaagtttttttgtttttttatttgtttttatatttggaagattttataggtggtgtgggttagttttttattttgttttttgtgtttttagtgtatgatagatattgagtgagtgttagtttttttttttgatattttgtttgtttgtttagagaggtttttttatagtttagttattaggttgatgtttttggatgtttggttgatagtttttttagttgtgttttagtgatttggtaggtgttttgagttataaataaggttattagtggatgtttttaaagttttttttattatggtgttttttttttttttattaatagtttgttatgatagttagtttgtatgagtttttttttagggttgtgttttttgaggttgtttagtgtttggtttgttagagtttattagatagggtgtttattttttttaggtttgagtttttatttagagaattatttatagaaggataatggagaaaggtagttggggtattaaatggagtgtgtttgtatgtggggggggaggggagggggagggaaagtaggaagagaagatataagaggagaaataagaataagaggaaatatagaaggaggaggagtagttttttttatgggggtggattttgtgtttagttttttattaaggatattatatttattattttgtttggtttttatgaatatttttaaggttgtttttttttggtttttatttttttattaggaagtggaggtatagagtgagaaagagttgtttaaggtttttaggtagtttatggagttattgggagttatatttaatttgtttaattttatgtttttgtttttagttattataataaattattaaggttttatagttataggagtttagtttggagtttttattgggttttttaaggtagggagatggggttggaggttatgttaggtgtatggtgtttagagttgtttaggaagttttgtggtgtgggttgggtattaggtagtgtttgtaggatggagaaatgaatgaggttgagatatagtgttgttttttttaaatgtgattttttttgagtttttgtgattggttatttgagagggtagttttggttttttggtgtttatgtttgggtttagagatgttttttttagttaggtttttttttgaggatggaaatttagaattttattataggaggaagagttgggagtattttattttttttttttttttgagatggagttttgttttgttgtttaggttggagtgtagtgatgtgattttggtttattgtaagttttgttttttgggtttatgttatttttttgttttagttttttgagtagttgggattataggtatttgttattatgtttggttaattttttgtatttttagtagagatggggttttattgtgttagttaggatggttttgattttttgattttgtgatttgtttattttggttttttaaagtgttgggattataggtgtgagttattgtgtttggttagggagtatttttaagatttttgtggagggttgtttaggtttaagttttttattatggaaggttttttagatgtggtagttatggtgtatgggttgagggtttttatttattaagaagtaggagtatttgatgtatatttagtttatgatttttatttatttgggggttgtgtttgtagttatgtgatataagggaatagttatagtagtgggttataaagagagtgtgggttaatgtgtaggggtagaattttgatagttttttatgggttggtagtagggaggggtatatttgtataaattttatatgtatagttttttatatatatgtggttgataattatttatatatttaagatgggatttggtgtatagtttattagtaataggtgttggtaatttttagttgtttttttgttgtggtgtagatattatttaaggtgggatggagagagttattgtttttaaggttatatattttaaagggagatgttgggttatggaatgaaaataggaggattagttagagttattggttttgagttatataatgggatatataggtttatttattttatatttttattgagtaattataatgagttaagttgtatagattatttaaataattggtatgtagaaaagtattttaatttttttttggttttgatgtgatgggaagaatttggatttttggagttatagagttggatggaaattttggtttagttaattattggttgggggagtttgggtaagtgatttaaggtttttgagtttgtttttttgtaaaagagtagtgtttgggtttgttatgttaggttagggtaagatgattgaagagtaagtgtttagtattggttaggggttaatgtttttaaggatgtaaagtgtaataagtaggtgttatgattgtattgttttttattgtttgtggtaaatatataagtaaagatggttttgtgtttgtgttgggggaggtagggaattggttttaggaggatgttggtttttttagttgttttttttaaagttttttgggaggagaaatgatttattttagttgttgggagttttaatttataagtaggtttgtttatttggtagtggttgtatgtaggtaggaggggttttggtagtttttaagagtgaggggttgtttagtttttttttagttggaaaggaggttttaggttgggtaggagtatttggggaaatttagtttttggagttaggttatattagggagatgaggttgttagaagtttttttggtgtttatagtaaaatataattaaagtgggatttagattttaattagtttaaggtttgatttatattagagggaaattagtgtttgttgtatgagtgagtgtttatgtgtgtgtaaggtagagatagattttgggtaagtttttttatttttttatgtttgtttttttatttataaaatggggtaatattatttattttatagggttgttatgaaataaatatgtattaatatttgtaaagtgttgagaatagtatttggtataaaataagagtgatagatttgttaaataagtaaaaaataagatataagtttaaagtagagtttggtatattgtgagtattaagagttgtgttttttgattttttttttttgtggagatttttttattagaagtgggagggattgttgaggttggagttttgttttagggatttttgtggggagttttttagtttagagggatttgttttatggattatatttgttttgggtttttgtgtttttgtgtatgtgtgtatatatgtgtgtatatatatgtaatgtgtgtgtgtgtatttttatggatttgtgataatttgtatatatatgtttagaatttatttgatatagtgttttattaagatgttggagttttgatgaatggattgtggggttgagatattgtttttataggaagttgttttagtagtaagttttttggtttttatagataattaaaaagaatggagtttgtttttattttttgttttaaaaatgatgtatagtgtgtggggtttgatgttggaggtttttttagtagatatatttttaataatattatattttgaaatttaagttgttgtaaaataagataagtaaagatggtattggtagggatttttgaggttttttttatgtatttttgaataatttttatatggtttttgtttgaatgtttttaggtatggggaatttattattttgtgaaatagtttgttttattgtttttaagtgaatattgtgagaaaaatatttttttttgtaaagagttaagttttatttgttagtattttttaggtatttggtattagttttatattttgggggaatttaaaataaatgttttttttttattagataatttattaattatttggagatagtggttgtagttttttgttttatgtagttattttatttagtttttttttggaatttttgatgtgaatataagtttttttgttatgtaggttttttttttgggttttttatttatttgtgtatattttggagaggttgtttgttttgtgggtgagatttattgtgggttgaattgtgtttttttaaaagatatatgtaagttttgattttttagtatttatgaatgtgattttatatggatatagggtttttgaagatgtaattgggttatttgagggtatattgaattagagtgggttttaaatttaatgataggtgtttttataagatagaggtaggttgggtatagtagtttatgtttttaattttagtgttttgggaggtaaagttttattgtttgagtgtaggagtttgagattagtttgggtttttgtttttataaaaaaattaaaaaattagttaggtatggtggtgtgtgtttgtgttttagttatttggaaggttgaggtgggaggattgtttgagtttgggaggttgaggttgtagtgagttatgattatgttattgtattttagtttggaggatagaatgagaatttgtttttaaaaataaattaaaaagataatagagagggtagtttggatagagatataagaagagatatagggtgaaggttaggtggggggtaggttgagttgtaagttgaggaatattaggggttgttggttgttgtagagtttggagaaaggtatgggatagttttttttggaatttttaggaggaatgaatttttagatattttggtttgggatttttggttttagaaattttagggaagatattttggatgtttttgtttttgtttttgtttttgtttttgagatggagttttgttttgttatttaggttggagtgtaatggtgtgattttggtttattgtaatttttatttttaaggtttatgttatttttttgttttagttttttgagtagttgggattataggtatttattattatgtttggttaattttttttttttttttgtatttttagtagagatggggttttattatgttagttaggatggttttgattttttgattttgtgatttaattgttttggttttttaaagtgttgggattataggtatgagttattgtatgtggttgattttggatgttttgagttattttatttgtggttttttgttatgatagttgtaggatagtaatatagggttttagtagggtggtttggtaagggttttttttttatggtagtttttattttgttttatttgtagggttatttagatgtttattttggttttggttagtaagtgttagtgtatttttttatgtttagtagtaagggtagtattgttgttgattaagtatttgttatgttggggtttttgtgtggttttggggttttttttttttgtttatatttggtagtttagtttttttttttgtattttatttgatgttggggttttgggtaagtttgggggatttgtgttttattttatagattttttagttgattttattagtttttgtatagggtttgtttgaagggttgttgggttgggtgttaattagagtttttagtagtagtttttttggttttttgattttggtttatgttttaggggtagggtttttaagggttttggggttgtttttgaggttagtttttttgttgattgtagtttatatagaggagggtttaattttgagtgtggttgtttgtgattttgagagatgtttagagttgtagatgtgttttttaagttttttagagtttgggataggagttatttaatgtttttagtgttataggtaaaatttgttttttttaatataaattgtttttagttttatttaatgttttttttaatgagtagtaataaaaatatggttttttgttaaaggtggggtttatagttttttagaatttggttttttgttaggtttaggtataatttataggagtgtttgtttttgatttgtgtgtgtgtgtgtgtgtgtgtgtgtgtgtgtgtgtgtgtgttgtgtgtatgtgtatatgtgtttgtgtaagtttttttatgtgtagttttgggaagggtggagaggtttatggaaattttttttggtatttagtaagttagaaaaaaggaaaatgagatttgtgtatatatgtgtaagtgtatatatagtatataggtatatatatatatatatttagtatatattatataggtttatatgtgtatatatgtgtaggtatatattatataggtttatatgtgtatatatatgggggtatatagtatataggtatatataggtatatatatttttttgtaggaaagtttttttttgttttttattttgtagggtttttaggttttatgaaataagattgaattttggaagtttgataaaaggtttgtttggagtattttggttatttttattagtttttttagttgtggaaggtatgttttgtggtatttatttattttttgtttttatttttatttttgtttttgtttttttttttttgtttttttagtttatatgttgtttgttttaattttaatttttgtatttggatgggaattattttttttgtagaagggtgtaatgtatgtggggatatatatatatatatatatatatatattgtattggaggagagaagagaggtagagttttttttagatttagagttttagtgagtgatgggattttttttagagaatatgtgtagaagtttgtgttattggaagaagatattattttgatttatattttttttttttttttttgttttttttatagagaaggaaaggttttagtaaatagtggttatgtgggttttttgtatgttattggtagttttttagttaggattattttttttttatttttggaagtataagaatagagagaagggtgagtttttgtttttgggggtttttttttgtatttttttggagttaattttagggttgtgggttgtataggaaggagggtttaataggttttttgtttaattttgtttttttagtgaggagttgatttattttgtttgtaaaagatgttggttgggatttgatgttgggtaatttgaggagaagagaagggggataggggttgaggttaggtttttggttttgaaatagttataatttttggggtagagtttaagggtgttaggttggagattttatatttggttagttggtagttattattttggtttagttagtggtttagggtattatagttatttagattaggaattttatttttttggattgtattaatgaggaaggttgagtttgtaggttttatatatttatggtaattttaaggtagagaggttattgttaattgagggttatgggtaggagttttgtgagtttattagtaagtttggaagattaaggtttttggttatagagagtagttgttatttggttaattttgtagaaaatattatagttttggataaaatatttgaaagaataaaataataatagtttggagttagtatagaatattttaagtaggtagaagttggagtagagtttatatttgatagaggggaataaaattagataagtttttggtttttggaggtttttttgtttagaggtaggtattgagtaattaaatttggataaaaagttttaaaagtatttagggaaaaataatatgtggtttataggggaatagttagatgaatgttgattttttgatagaaataatggaggttaaagatattggaattttatattttaaagttttgaaagaaaaaattgataatttagaattttataattagtgaaattatggtttaagaatgatagtaggttgggtatagtggtttatatttataattttagtattttaggaggttaaagtaggtagattatttgaggttaggagtttgagattagtttggttattatggtgaaattttatttttattaaaaatataaaaattagttgggtatgatggtatatgtttgtagttttagttatttgggaggttgaggtaggagaattgtttgagtttgggaggagaaggttggtgagttgagattgggtaggagttttgaaattatattattgtattgtagtttgtggggagatagagtgagattttgttttaaaaataaaaataaaaataaaaaaagaaagaatgatagtaaaataaagatttgtagataagtgaaaatgaaagggaattagttgtttgtaaatttgtattataaaaattgtgaagtaagttttttaagattatgggaaatgagattagatgggaatttagttttttaggaaggaatgaagagtataggatatagtaaatatatgggtaaatagaaaagattttgttttatttttaatttttttaaaatgtatggggttgtttaaagtaaaaatttttttattgtattgtttagtttataatgtgtatggatgtagtaaatatttaataattattatatataggatggaaagtggtaaatgaatttataggattgtttagtttttatattttttttttatgaagaaaaataatgttaattttaagtagattgtgaaaagttaagaatgtgtaatagaatttataaagtaattattaaaatagtaatataaagagatataattaaaaagttaaaataggttgggtttagtggtttatgtttgtaattttagtattttgggaggttagggtgggtggattgtttgaggttaggagtttgaggttagtttggttagtatggtgaaattttgtttttattaaaaatataaaaattagttggttgtggtggtaggtgtttgtaattttagtatattagggaagttgaggtaggagaattatttgaatttaggaggtagaggttgtagtgagttaagattatgttattgtattttagtttgggtaatagagtgagattttgttttaaaaaaaaaaaaaaaaaaaaaatataaattaaaatagaattttaaaaaatatttaattaatataaaagaagttaagaaagtaagatgaaagaaataaatattaaagagtaaggtagtagttttaaatttagttatatttataattatgttaaatagaaatagtttgaatattttaattaaaaggtggaggttgttagaatgaataaaatagtaagatttaattatatattatttataaaagatgttgttttagtataaatataggttgaaattttttgtttggaaaaagatatattgatgttgtttgaatgatgatggagttatgttttgataaatttattataagtggaaaataaatattattttaaaaatgtatttaatatatttaatttattgaatattttagtttagtttagtttattttaatatgattagaatatttattttagtttatagttgagtaaaattaataaatataaagtttattttataataaagtgttgattattttatgtaagttattgaatattgtattgaaagtgagaaatataatggttttatatatatttaaagtatagtttttattgtatatatattatgtttgtattatggtaaagttgaaaaattgtaagttaaattattataagtttttttataagtttttttagtttttttatgtattttaaatagtatgtttaagaaggttggagaggttatataaatattaataaagttgagtttaagataaaattattatgagataaaggaatatatttattatggttaaatgattagtttattgagatattattataattataaatgtgtatgtatttaattaaaggagttttaaaatatatgatataaaatttgaaagaattaaagggagaaatgggtaattttataattataggtggagattttttttttttttttttgagatggagttttatttttgttgtttaggttggagtataatggtgtaattttggtttattgtaatttttattttttgggtttaagtgatttttttgttttagttttttgagtagttgggattataggagtttgttattatgtttagttaatttttgtatttttagtagagataaggttttattatgttgtttaggttggttttaaatttttgattttaggtgatttatttgttttggttttttgaagtgttgggattataggtgtgagttattgtgtttggatgtatagttggagattttaatattattttagtttatttaggatgttaaaataaaatgttttaggttgggtaatttataaatagattgtagtgtttatagttttagaggttgggaagtttaaaattagggtgtttagtgtttggtgagagttagttttttgttttagagatgttttttttttgttgtgtttttatatggtagaagggattaattttatttatgatgattttgtttttatgagttaatatttttttgatgttttaatttttaatattattgtattagagattaagttttaatatatgaattttgggggatataaataggtaggttatagtaaatattatttttttaatatttgagaaataagtattagataatttgaagaatattggtaattagtaattgatttaattagtagttataaagttttatatttaggaagtttagaatatatatatatattttttttttaagtgaaaatagtgtatttattaagatatatattttgggttataagttttaaattttaaaagtatgtaaaatatgtttgtttggttaaagtaagattaaattagaaattaatagttttaagatatttagaggagttttgattatttgtaaattaaataatatatttttaaataatttatgagttaaagaggaaattataagaaaaattttataatattttaaatgaaatgataatgaaaatatagtatattaaaatatgtaggttgaagttagtgtttagagggaaattgtaagtgtttatattagaaaagaagtaaaaaaaaaaaaaaaaaaaaaaaaaaaaagatttaaggatttgttttaagaatttggaaaaatgggttaggtgtagtgtagtttatgtttgtaattttagtattttgggaggttaaggtaggtggattatttgagattaggagtttaagattagtttggttaatatggtgaaattttgtttttattaaaaatataaaaattagttgggtatggtgggtatttttagttatttagaaggttgaggtaggagaatggtttgaatttgggaggtggaggttgtagtgagtttagattatgttattgtattttagtttgggtaatagagtaggatgtttttttaaaataaaataaaataaaataaaataaaataaaataataaaaaaaataaagaatttggaaaaatatgttagttatttatgtattgttttttaattttgtatatattttgttaggttttgttttgtgatattggattgaggttttatgagtttttttttttggttaaatatagttatgttaggttttatttataggggataatattgtggggagttgttaggttttgttgaggtagtagtttttttttttggttttagggttttttttttttttgaaggtatagttgttagtggtgtgtgtttagtggggtttgttttgtattgagtttttttagtattttagttttagtttaatgggattttagtaaattttttagatatttagtttttgtttatttatattttttagtaggttttttggttatttagtaagttgattttgtagatttattttttttatattttttggtaagaatttttttgttattagtaggttgtaggtttttgtggtagttatatattttttaataaggtttgaatgtaagatgtggtaaggtgtggaggatgttttgagtttttggttttttttttattaattttagtggtagtaattgtttttgtgtgtttgtatatatgttttaaagtatttattatagaaaatttattattttaattatttttaggtgtgtagtttggtggtatgaagtatatttatattgttgtgtaattattattattatttattttatttttttaaattgtaattttatttttattaaatattaattttttatttattttttttttttttagtttttggtaatttttattttattttttgtttttttgaatttgattattttagggattttataaaagtgaaattatatagtatttgtttttttatgtttggtttttgttatttagtatgtttttaaggtttatttatgttatagtatgtgttagaattttttttttttttttttttttttttttttttgaggtagttttgttttgttgtttaagttggagtgtagtggtatggttttggtttattgtaatttttatttttttagtttaagtgatttttttgttttagtttttttagtagttgggattataggtatatgtttttatgtttggttaatttttgtatttttagtagagatagggttttgttatgttggttaggttagttttaaatttttgattttaagtgatttgtttattttggttttttaaagtgttgggattataggtgtgagttattatatttggttttttttttttttttaaggtagaataatattttattgtatagatggattatattttgtttgtttatttatttgttggtggatatttgggttgtttgtattttttggttatgggaaaagtgttgttataaataagaatgtagtatatttgtttaagtttttgttgttagttttttggagtatatatttagaagtggaattattggatgttatggttattttgagtttaattttttgagtaattgttatattttttttatagtagttgtattattttatatttttattagtagtgtatggggttttaatttttttatatttttgttaatatttgttgttatttatgttttggttaatagttattttaaagggtgtgaaattatattttattgtggttttgatttttatttttttgatgattagtgatattgtgtatttttttttgtgttttttggttattggtatgttttttgtggaaaaatgtttgtttattgggttgtttttttttgttttgtggtttagttgtaggagttttttatatattttggatattagttttttattggatatatgatttttaaatatttttttttattttgtggattttttttttatgttattggtagtattttttgatgtataaaagttttaagttttggtgaagtttaatttattatttattttttttgttgtatttttggtgttatatttaagaaagtattgttaattttaatgttatgaagttttttttttatgtttttttttaaagtagttgttttttatatttgttttttttatattttttagagtttttttgtataaggtaaaataaattttatttttttatttttatttataatatttagtgttttagttttgatattagatgtgtggtttttttttgttgatttttaagtaattttttaatatttagtagtttttaattgggtgttttgtaatttagtttaattttgatattaattagagttagtgtagattttataggttaagggttttattttataagattgtttttaattttagagattagttgtaagtggtaagatattaggttatttataatttttgtttgatttggttataaatttgaggtttttataattttttttttaggtttaataatttgtttgagtgatttatagaatttaggaaattagtttatttaaaattgttgatttattataaatgatattttaaaggatataaatgaatagttaattggaagagatgtataagaaaggtatgaaggaagtggtatggagtttttatgggagggtatattgtttttttagtatttgtaggtatttaataatttgaaattttataaattttatttttttgggtttttagggaggttttattatataagtatgatatgaaatttttggttattgatgattaatttaatttttatttttttttgttttgtaggaggtggatgggaaaggttgtaagttttagttttttaattataaggttgggttttttggtaattagtttttatttttaggttgtttaggagtttttagttattagttgtttttttagtaaataaaaagatatttattattttggagattttaagagttttaggagttatatgttaaataaagttgggggatagagattagatagatagatagatagatagatagatagatagatagatagatagatagatagatatattgatttttgagatagagtttttttttgttatttaggttggagtgtagtagtgtaattttggtttattataatgtttgtttttttgggtttaaattatttttttattttaattttttaagtagttggaattgtaggtatatattgttatgttaggataattttttgtatttttggtagatatgaggttttattatgttgtttaggttggttttaaatttttgagtttaagggatttgtttgttttagttttttaaagtgttgggattataaatatgagttattgtattgagtttagtttaaatatattttttttatattataatgttatttttttgtgatttttttaatagttaattattttttatagttaagaatattttatattataagttgttatttaaattgttggtgtggtttttgttttttgattgggttttgattaatgtgttgaagtaagtataaggaaggaagtaatgaagataatagagaaatttaaggaaatggatattagaaaaggggagtttaatgttggttttttaaaaagatttagattgataattttttagttaggttgttgatgagagggagatggtgaatataaagttataataaaaggaatgaagtgttttttttatggattttattgatattatagtgataaggaatataggtatattttattttattgtgttttatagatattgtattttttataaattgaaggtttgtggtagttttgtattaagtaagtttgttggtattatttttttaataatatgttaatattgtgtttttgtgtaggagtttgatgatttttgaaatagtttaaatttttttattattattatatttgttatggtgatttgtgatttttttttttttttttttttttttgtttttttttttttgagatagagttttgttttgtttggagtgtagtggtgtgattttggtttattgtaagttttgttttttgggtttatgttatttttttgttttagttttttgagtagttgggattataggtatttattattatgtttggttattttttttgtatttttagtagagatggggttttattgtgttagttaggatggttttaattttttgattttatgatttgtttgttttggttttttaaagtgttgggattataggtgtgagttattgtgtttggttttttttttttttttttgagatggagttttgttttgttgtttaggttggagtgtagtggagtgtagtggtgtgattttggtttattgtaatttttattttttaggtttaagtgatttttttgttttagtttttttagtagttgggattataggtatttgttattatgtttggttaattttggtatttttagtagagatgaggttttattatgttggttaggttggttttaaatttttgattttaggtgatttatttgttttggttttttaaagtgttgggattataggtatgggttattgtgtttagtgattagtgatttttaatgttattattgtagttgtttttggggtatgatgagttatatttagataagatagtgaatttatttaataaatgttgtatgttttgattgttttattgattggttgttttttgttttttttttttttgtttaggtatttttattttttgagatttaataatattgaaattaggttaattaataattttataatggtttttaagtgtttaagtgaaaggaagagttatttgttttttattttaaattaaaagttagaaatgattaagttgagtgaggaaggtgtgttgaaagttaagataggtaaaagtgagattttttatgttaaatagttagttaagttgtgaatgttaagaaaaagttattgaaagaaattaaaagtgtgattttagtgtatatatgaagaagaagaaagtaaaatagttttaatgttgatatgaagaaagtttgagtggtttggatagaagattaaattagttataatatttttttaaataaaagtttaatttagggtaaagttttaattttttttaatggtatgaaggttaagagaagtgaggaagttggagaaggaaagtttgaggttagtagaggttaggttatgaagtttaaggaaagaagttatttttataatgtaaaagtgtaaggtgaagtagtaggtgttgatggagaagtggtagtaagttatttagaagatttagtttagagtattgatgaaggtggttatattaagtaatagaattttagtatagatgttttattttttattggaagaagatgttatttaggatttttatagttagaggggagaagttaatgtttgtttttaaagttttaaaggataggttgatttttatgagaggttaatgtagttgttgattgtaagttaaagttaatatttattgattgttttaaaaattttagggtttttaagaattttgttaaatttattttgtttatgttttagaaatggaataataggttttatttgatagtatatttgtttatagtatggtttattgaatattaaaaatttattgaggtttggtgtggtaatttatgtttgtaattttagtatttttgaaggttggggtggggggattatttgaggttaggagtttgagattagtttggttaatatggtgaaattgtatttttattaaaaatataaaaattatttaggtatggtgttatatgtttgtaattttagttatttgggaggttgaggtaggagaattgtttgagtttaggaggtggaggttgtagtgagttgagattgtgttattgtattttagtttgggtaatagagggagattttgttttaatttgaaaaaaaataaaaaaataaaaaagggttaagtatggtggtttatagttgtaattttagtattttgggaggttaaggtaggtaaattatttgagtttaggagtttaagattagtttggttaatatggtggtgaaattttatttttattaaaaatataaaaattagttaggtatggtagtgtatatttgtagttttagttatttaggaggttgaggtaggagaattatttgaatttgggaggtggaggttgtggtgagttgagatagtgttgttgtattttagtttaggtaataaagtgagattttgttttaattaaaaaataataataaaaaaaaaataaatagggtttggtgtagtggtttatgtttgtagttttaatgttttgagaggttgaggtaggtggattatttgaggttaggagtttgagattagtttggttaatatggtgaaattttgtttttataaaaaatataaaaattagttaagtatggtggtgtgtgtttgtaattttaattatttaggaggttgaggtataagaattatttgaatttgggaggtagaggttataatgagttgagattatgttattgtattttattttgggtgatatagtgagattttattaaaaaaaaaaaaaaattattgagatttattgtttaggaaaaaagaatttttttaaaatattattgtttattgataatgtattttgtgatttaagagttttgatggagatgtatgtaaagatgaatgttgtttttatgtttgttaatgtaatatttattttgtagtttatggagaagggataaatttgatttttaagttttattatttaagaaatatattttataaagtagtatttgttatagttagtgatttttttaatggatttgggtaaagtaaattgaaaattttttggaaaggattttttattttagatgttattaagaatatttgtgatttataagaagaggttgaaatattaatattaataggagtttggaagaagttgattttaatttttatggatgagtggtttaagattttagtagaggaagttattgtagatgtggtggaaatagtagagaattagaattagaagtggagtttggagatgggattggattgttgtaattttatgattaaatttgaatagatgaggagttgttttttatggatgagtagataaagtggtttttggagatgggatttattttaggtgaagatgttgtgaatattgttgaaatgataataaaagatttagaatattatattaatttatttgattaatttgtggttagggttgaaagaattgattttaattttgaaggaagttttattgtgggtaagatgttattaaatataatgtgtgttatagaaaaattttttatgaaagaaagagttaatttatgttaaaaattttagttaagaaattgttggttaggtgtagtggtttatgtttgtaattttagtattttgggaggttaaggtaggtggattatttgaggttaggagtttgagattagtttggttaataaggtgaaattttgtttttattaaaaatataaaaattagttaggtgtggtggtaggtatttgtagttttagttatttgggaggttgaggtaggagaattgtttgaatttgggaggtagaggttgtagtgagttgaaattgtgttattgtattttagtttgggtaatagagtaagattttgttttaaaaaaaaagaaaaagaaaaaagaaataaagaaattgttgttatagttatttttaatttttagtaattattatttggttagtagttattaatattgaggtagattttttattaagaaaaagattatggtttgttgaaggtttagatgattattagtattttttagtaaaaagatataatgattttatatattttaatagattatagtatagtgtaaatataattttttttttttttttttgagatggagttttgttttgttatttagtttggagtatagtggtgtgattttagtttattgtaatttttattttttaggtttgagtaatttttttattttagttttttaagtagttgggattataggtatgtgttattatatttagttaatttttgtatttttaatagagatgaggttttattatgttggttaggttgtttttaaatttttaattttaaatgatttgtttattttggttttttaaagggttaggattataggtatgagttattatgtttggtttaaatataatttttatatgtattgggaaattaaaaagtttgtgtgatgtgttttattgtaatatttgttttattgttgaggtttggaagtaaattttaggtatgtttgtattatgaataattttaaatgagtaaatttaataatttatttgaaagggataaatttttttaaagtataatttattaaaagtaagataaggggaagtaaaaaaatttgaataattttttttatatattaaattgaatttgtgattaaaaataaataattattttttttagtagaaaattttaggtttagatggtttttttggtggattttattaaatatttaaggaagaaataatattaattttatgaaaatatagaaaataaagagaagggaatatttttaaattaattttatgaagttaaaatgaggttgataaagatattattgaaataaattaataaataaagaaaatattatattaatattttttatgaattaatatgtaaaaatttttaaaaattgggtaaattaaatttagtaatatataaaaaggatgatattttataagtaagttggattttttttagaaatgtaaggttggtttaatattaaaaaattaggtttgtatagtggtttatatttgtaattttagtattttgggaggtagaggtgggagtattgtttaagtttaagaattgtagattagtttgagtaatataatgagattttatttgtataaaaaattttaaaaattaaaaattagtttggtatggtggtatgtgtttatagtttttgttatttaggaggttgaggtgggaggattgtttaagtttaggagtttaggttgtagtgagttatgatggtattattgtgttatagtttgggtaagagtgagattttgtttttttaaaaaaaaaaaaaaaaaaaatggggggtaaaaattaattattgtaatttattttattaaatgaataaaagataaaataatgattatttttatagatgtagaaaaagtatttattaaaattatatttatttatgttaaaaaattttagtaaattaagaatagaagggaatttttttaatttgataaaggttatatatgataaatttaaagttaatattataagtttggtataggtaaggatgtttattaattattattatttaatattgaattggtagttttaattagtgtaataaagtaagaaaaaaaaataaggtattaagattagaaagaagtaaaattatgtatttaaattttaaaagatttataaaattattattagagtaataaatgattttggaaaagattataggatataagatttatatataaaaatttattgtatttttatatattagtagtaaataattaaaaatgaaatttaaaatttattttagtttaaaatagtgttaaaagtaaaatttttaggaataaatttaataaatggtatgtaagattttttttttgaaaattataaaataatgtaattttgtagagatttttttttagtagagaaataaaagaaatataaaaggatttttaaaatggagatatattatttatataaaagatttaatattgttaaaatgttaatttttttttaattgatttatagatttaatataattttaattaaaatttatattgtatttttgtagatattaataagttattttttaaatttataaggaaatttaaaggatttagaatatttaaagtaatattttagatatttgagagattttatattaagatttattgtaaagttatattaattaagatgtggtattagtaaaggaatggataaaatattaagaaaatataatagtgttttaatatagggtttatatgtatatagtatatatattaatataggattatatatatagttaatataggatttatatgtatatagtatatatattaatataggattatatatatagttaatataggatttatatgtatatatgtatatatattaatataggattatatatatagttaatatggggtttatatgtatatatgtatatatattaatataggattatatatatatatatagttaatatagggtttatatgtatatatgtatatatattaatataggattatatatatagttaatatagggtttatatgtatatatgtatatatattaatataggattatatatatagttaatatagggtttatatgtatatatgtatatatattaatataggattatatatatagttaatatagggtttatatgtatatatgtatatatattaatataggattatatatatagttaatatggggtttatatgtatatatgtatatatattaatataggattatatatatagttaatatagggtttatatgtatatatgtatatatattaatataggattatatatatagttaatatagggtttatatgtatatatgtatatatattaatataagattatatatatagttaatatggggtttatatgtatatatgtatatatattaatataggattatatatatagttaatatggggtttatatgtatatatgtatatatattaatataggattatatatatagttaatatggggtttatatgtatatatgtatatatattaatataggattatatatatagttaatatggggtttatatgtatatatgtatatatattaatataggattatatatatagttaatatagggtttatatgtataaatgtatatatattaatataggattatatatatagttaatatagggtttatatgtatatatgtatatatattaatataggattatatatatagttaatatagggttgatatgtatatattaatataggattatatatatagttaatatagggttaatatgtatatatgtatatatattaatataggattatatatatagttaatatagggtttatatgtatatatgtatatatattaatatagggttatatatatagttaatgatttttagtaaaggtgttaggtaatttaatagagtaaggtatgtttttttaataaatggtgttagaattggatatgagtatagaaaaataagaattaattttgattttaaattaaatataaaaattgatttaaaatggattatataatattttgatggttataataggttaaaaaatgtaaaaatttaaaaaattaaaaaataaaaggaattatagaatatataattataaaatttttagaaaataagagaattttttttgattttagtgtaggtaaagattttttttataggttataaaaattataaattgaaattggaaaaagttgataaattggattttatgaaaataaaatatttttgtttattaaataatattattaagaaaattaaaaggaaaggagtaatgtggaaaaaaaaatttatgatatatatatttgataaaggatttatatttagaatatataaaaaatatatgaaataatatttttttttttttttttttttgagatagagttttgttttgttatttaggttggagtgtagtggtgtaattttggtttattgtaagttttgttttttaggtttatattatttttttgttttggttttttgattatttgggattataggtgtttgttattatgtttggttaattttttgtatttttagtagagatggggttttattgtgttagttaggatggttttgattttttgattttgtgatttgtttgttttggttttttaaagtgttgggattataggtgtgagttattgtgtttggttaattttttttttaaatgagatttatggggaaatagttaaatgaagaaataataaagtagtaataaaataaaatttaagttttattttattgtgtagttgtaggataaagagtagaagtttgtagttggggaataaggtgtttatttttttaagtattataaaatgaaggttttagaaattatttgattttgaaataatataattttaaaaagaagtaagatgtggatagataattttataaaggaaaatatgtaaatgattaataaggattttggaaaattgtgtgattttataagttattaagaaaatataaaataaaagttttaaaaaaaaatgaagtttggaataattgaataaatatataaaatgataataaaatgaattttgattttttattttatattatatgtaaaagttaatttataaaagttatataattttaagttttttaaaggaaaatataaatatttttgtaatttggtagggtaggtaaaggttttttataaagaatatagagagagaattataaagaaaggagtttgttaaattagattttataaaaattaaagtgatatatttttgtttattggaaaatattattaagaaaatgaataggttgggtatggtggtttatgtttgtaaaattggtttttggggaggtagaggtaggaggatagtttgagtttaggagttttagatttgtttgggtaatatagtgagattttgtttttgaaaaaggaaagaaaatgaataggtaagttatagattggaataaaatatttgtaaaatatgtatttgataaaagattagtatttagaagaaaaagttaagtaatttaattttaaaatgagtaatagatttgaaaagatattttataaaggaaaaatatatgaagagttaattatgaaaatgtgtttaattgtattagttattaggttaaagtaaattaaagttataatgagatgatattattatatgtttattagaatgattaagattttatagagtgatagtattaaatgttggttaggatgtggagtaattagaatttgtatttattgttggtgggagtgtgaaatggaagggttattttgggaaaagatttggtagttttttataaaattaaatgtatatttattttatatttattttaggtgtttttatagaataaatgaatgtttatatgtatagaaaaatttgtataagaagaattagtgtaataggtttatttataagagtttttagatggaaatagttaggggttttttaataagagaatgattaaaaatttatagaatgtttatatagtggatgttatttagtaataaaatagaataaattgttggtatttgtagtaatatgggtagttttaagaaatatttaaattggtaaaattattttgtggtggaaaaaaagtataattgtggttgttttggggaaggtggggattgtgatgtatttggaggggtatgaggaatttattggggtgatagtgatgttttatgttttggttaggttgggatatatgtggatatttttgttaaaatttaaagaatggaatgttttatatttgtgtattttagggtatatatattttattttaaagaaaaataaaaataattatagataaatgttggattttagttaatgaaatgtaaattgaggtgttgataggatgttgtgtgttgatttttgtagtttattttaagtgtattaaaattagtgtggatgttggtggttagagggatttgtggtgaagtaaatagtaaaatggttgttgtggaatttaggtggtaggtgtatgggtgtttattttagaattttttatggttttttttttgtggttttgttttgttttgtttttgagatagggttttgttttgttgtttaggttggagtgtattggtataattttagtttattgtagttttaattttttaggtttaagtaatttttttattttaattttttgagtagttgggattttaagtttgtattattatgtttgattaattttttgtattttttatagagatgggattttattatattgtttgggttggttttgaatttttgggtttaagtgatttttttattttaattttttaaagtgttgggattatagttatgagttattatatttagtttttttttattttttttatgtttgaaaagttttatggtaaaaagttggaaaaatgtaaaaaagattgaaatttattaattaaaaataggaaaaataaaataaaagagatggtaggagattattttttttttttttaatttagtttttaattttttttttttttgtttagttaggataggaattttaagggtttgggttttttgtgtttgtgtggggaaggaggtatttttgtgtttgtgtgggggttggttatttgttttttggtgtattttttgtattttatttttttttgtttgtagtgagtagttatagttggtggaaattatatttaggtagtttttgtttataaatttagtgaaaatgtaaattttgtaggagttggatttttgagagtttgtggtgttatttgttggaggaaaggttttttgtatttgagtttttttttttttttttgttgttatttgtttttttgtttaggttgggtgggttttttttttgtaattttggggtattggtgtatgggaaatgtttagtgttttataatttttttttatttatattttaatatttagtttttagtggatattgtttttgtttgataaatatattatataggtatagtttaagattatttattttaggaggagtataagttttagtgtttattattttagtttttttttttttttttttgatgtagtgatataggtttaggatattgaagatttttgattttataaatatgttgaagttaattattttgaagttgtagtttttattattattattattttttattttttgtaaagataaagttttgttatgttgtttagtttggtttggaatttttggatttaattgatttttttgttttggttttttaaagttttgggattgtaggtgtgagttattgtatttagtttgaagttgtagttttttaattattgttaatagtaatatttatttttttgtgagtagtagggtttgttggtatggttgatagttttgtattattgtattgaatttgttgtttgggattttaggtgagttttgatttttagttggagggataagttgtgtggggttgggtagggtgaattgtgggagattaagtttagattgagggttataagttatatgagtattggggttaggtagggatagtgaaggagatagtgtaattttgaggaaagataatgttatagaatggagaggtttaggtttggggtttttttttgttgttggataggtatgtttgtgttttttttttagtttttgtgatggttaagttatgtgttttttgagaggtaagtgaggtttttgatagtaggttttaggttttaattaaattgtttgttttgtagggtgagttgtataggtgtttttatttttgatttttttgaatttttgttgtttttaagttttatttattttttttaggtgaatagaaatattgtttaggggagaatggaggaagaatttaggaaaggttgtttgagagtttggttgagtttatgttattgttaagagtagtgttaaaatttaggagttggtgagattatggtttagggtttatattaatatgagggggtgttagttttatgattaatgagtttttgttttattattttttgttatttatattttgagggttatagttagtatgtgaattggagttggtttttggtatttttttttttatattagttttataatgtgaggtgggggtttgtttttagaggtatttggagtagtaggtgttttaagagggggaagtttttttgaagtttttttttatttatggtataggatgtagaggggatagagtattaggaatatttagtgattataggggtttgttttgaaggagaggaggtaggaggtagggagagtggttgggaggttagttttggagtgtttattttttattttgagggagaggaaggaagtagaaggtgagtatagggagttttagttggggatggagtgggggttgtagtttgattgtgttgtttggagtgggggtatggattgtagtttttatttatttgtttggttagtttgaagttattttaagtttggagattttatttgttttgtttattttttttagggatggtgtttaaattttgaagttttggttggtgttgtaaatatgggagggaggttttgttttattttagttttaagagttagttaagaatgttttggatatttgaattttgttttgagttagaggttgggaagaaatttgaaggatggtgggatggtggatagtagtttttaggtattaggtattagggtttttgtttggggatgggggtattagtaggtgttaagtgtattatattagggtttattatgtttttgtttagagatttagtattttatgaaataggaaggaatgagggatgagtgtgtttttttttttaatattttagtttttgttttgaggttgttaggtatttaatttttttaggatttaaattattttggttttatttatggttaagtgtattaaattatagttaggattattgggtttagatattaaaagtgttttttttaaagttggtagttattagggtagtatagggtagtgtaaggttgggtagggttggttatttgttagtatttagtggtttttgttggatgttgatgggggtagttaggtaggtgggtttatttagtaattaaagagattttttttttttaattttttttttaaagagattttgattttttttttttagttgtagggtttgtagtagttttttttttagtaggtttttttgtttgtttttggttatttttagtagttatagggtattgaggttttattatagtgagaataaaattaagtttttattagggtttttaaggtttggtatgatttggttttgtttgttgtattggtgttattatggtttgtttttgaaaatatattttagttatttttattttttttaggttttagttttgggtttttatatttgttgttttttttgttaggttgttttttttttggattttggtttggttgggtttttttggttattatagttttagtttagtgttattatttagaaagggtttttattaatttttttgttatatatatagatatgtatttttagtaatttgtttttagtttttttatagtttttatttaaaattatttatggatttgtttatttgtggattgttttttagttttaattgttaagtaataagtgattagtgattgtgtttttgttgttttttattataggttaagtatttaagagaggggttgtatatagtaggttttaataaatatttattagatgggttaggtatggtggtttatgtttgtaattttagtattttgggaggttaagttgggtggattatttgaggttaggagattgggattagtttgattaatatggtgaaattttatttttattaaaaatataaaaattaattaggtatggtggtggatgtttgttattttagttatttgggaggttgaggtaggagaattgtttgaatttgggaggtggaggttgtagtgaggtgagatggtgttattgtattttagtttgggtgatggagtgagattttgtattaaataataataataaaatatttgttagaagaattaaagtagtttgtttgtgtttaataggaatttaagagtataagatgaatttaattaaaggatatatatagtaggtattttatagttgatatttgttggtggagggagattaggaaagtggggagaggtagtgtttgggtatggggatattttgggtatggggatgttttggatatagggatatattgggtatggggatattttgggtataggatgttttgggaatggggatattttgggtatggggatattttgggtatggggatgttttggatatagggatattttgggtatggggaaattttgggtatggggatgttttggatatagggatatattaggtatggggatattttgggtatggggatgttttggatatagggatatattgggtatggggaaattttgagtattgggatgttttaggtatggggatgttttttgttatttgaaattttgtagttttattatatttgtttgttttagtaaattggtttaaagagtatttttaagtttttatggtaaagttttagagttagtgtttttttgttgattttgagggtgtgttgtttatttagtgtttaagttagagtttttttatttagaaaaaaaaagaggagggtggttttatggatggaggtatgagggtgtttataggtagagggagtttttgggttgagatttgtgttattttttgttttaattttaaggtgtagtttggagtttaaattagtttttaaatgtgggttgttggttaagaggaatttttttatttatgatttttttttatatttagtttttattgtttagagtatgttagttttgtttgttttggtttttaggatttttttagggatttttaggttttaagttagggtgggtttgaattaaggtagttttagaatttatgttaatgtttttgttagtgggagattttggggagtattgtgtgggatgtatggggttaggtgggggtatatagtgagtggttttagaagttttggttgtttggagtgggggggtgtttagagtaagagatgggttaggaagttggagtgagtaaggaggttttagtttttggtgggagtaggttgggtaaaaataaattaatttgagggtagtagttagtgagattattataggaggggtggtggggttggaggggttttaggagtttaggagagggaggtattgttagaggtaaggttggtagatgagagttagtgttggtaggattaatttgttatagtagttatggtttattttttttttttttttttatatatgtttttggggtttatggaatttattagtttattataaaggatattataaaggatataggggaagagatgtgtagggtaaggtatgggggagggatgtagagtttttatgtgttttttaggtgttttattttttaggagtttttatatgtttatttatttagaagtttttggaattttatttttttgagtgtttatggaggttttattatgaaggtatgattgatttaattattggttgttgatgatttgtttaatttttagttttttttttttatttggaggttgtggggtggtgttgaattttgtgattttatttggttttttttgggaattattttgaagttgttagttggtttgttaattatgagtatttaaaaagatattattttggagattttaaggattttaggagttgtgtgttaggaaatggagatgaaaattaagtgtatattttataatatgatagttagttttttttaattttagttttattttttgttgtgttgttggttttagttttttgtgttttagggtttttgaatatattgttggttgtttgtagtgattgtttttgtttgttgggtttgagtttggtttattttttttatttttttgtgtttagtttgaaggtgtttttttgaggtagtttttttgatttggttttatgaattgtaggttttgttttgttattggttttttttgttatatttgttattttttgtgttttatgtttattgatgtggttttgtatttgtgtagttttatgagggtaaggattgtgtttggttttgttttttatgggattttagtgttaagtttatagggagtatttaatgttgaatgaatgaatgagtgattggtaagggaggtttattttgttatgttgggggttaaaggttgttgggtggattatatgggtgaggttgggtggggagggaagtagagatgattttttggaagaaggggtaggaggtggggaggtgggtgtggggtgttgtataaggatggtaagtgtttttaggggtgataagttaatttagagtattaggtagtagaaaaaggttgatatttttatgttttatttttatttagggagaggttaggtttttgggaaagttagttttttgttgttaggagagttttaagggaagttttattagttgttgagttggttatagtggaaatttatgtggtgggtgggaggggtttgaggtataggggtttgggtggtggttttaggatggagatttgtgtttagattatgaggggtggttttagggatgattatttttaaataggaagtagataaaggtatagatggtagaagtggaggtagagaatgggttgtaggggtttttttagagggagagttgagtaaggggataggttggaaatatttagtttttatggtttgaagtatagatagttggttttatatgtaggttgggtagttatattatttagaataaggggtatgtttgtagggtaggttttaggatgttttgggttggttttgttattagtttagaaagatggtttaggtttttttggtagggagtatgtttagttaggttttgggtaggagttgagattttttggttggtttgagaggggatgattgagtgtaggtttagtttgggatttttttatttttttttgttatttagtggaattagttgggtgtgagaaaagaagagaagtgaattaagagtttagagtatgaggttggattagtttttatattatatgtaaaaattaatttaatttgtattaaagatttaaatttaagagttaaaattataaaatttttagaagaaaatataggggaaaagttttttgatgttgtatttggtaatgattttttggatatggtgttaaaagtataggtaatagaagaataaatagataaagtggaatgttatagaagtttaaaatatttgtatattagtttgggtgtggtgatttatgtttgtaattttggtattttgggaggttgagatgggtggattatttgaggttaggagtttgagattaatttagttaatatagtgaaattttgtttttattaaaaatataaaaattagttgggtgtggtggtgggtgtttgtaattttaattatttaggaggttgaggtaggaaaattgttggaattagggaggtggaggttgtagtgagttaagattatgttattgtattttagtttgggtaatagagttagattttattttaaaaaaaaaaaaaaaaattgtatattaaagggtattaataatgtggggagaaggtaatttatggaatggtagtaaattataggttagatatgggattagtatttggatattaatttatagattttttaatatttagtaataataattatttaaattaaatataggtaaaggatttggatagatatttttgtaagaatatgtgtaaatgagtaataaatatgaaaagatgtttaatattattaattattggggaattgtaaattaaaattataaggagagattttttataattatgagttttgggtaggtaggaagatgtttggtggggagttgttggttttatgttgtttttagaatttttgtaggggttaagtttgattttgatattttattaggagtatagaaatgagtggaaaaggttaaaggttattttaaagggttagaggggtttagtaaggagtttgggatatggaattatgttgtgtatttagatatatggggataatagggggatgaaaggtggtttttaaaatttatatttattttagagtttatgaatatggtttatttggaaaaagggtttttgtagatgttatgaagttaaggattttgagatgggattattttgggttatttagtgggttttaaatttgagaaagattgtttgtatgagagatagatagggggagatttagggtatagaaggaggttttgtgataatggaggtagaggttgagtggtgtggttatgagttaaggaatgttaagggttttgggagttgttagaagttgttagaggtgagaagtaggtttttttttggagtttttggaaagaattaggtttgttgatgttgtgattttggatttttggtttttagaatggtgagagaagaaatgtttggtgttttgagttatttagtttgtggtatttggtgatggtagttttaggaaattattatagggattagagtttttatggggttgggtaggaagtgggtgtagagtgtgttaggttaggttttttattttggagatggaaaagtagagttggagaggttgagattggataggtattgagtgtttaggggtaagaatttttaggggatggtagaggttattggggatagtatagtgagggataggagggaggggtgagggttgaggtattgttttttaggaggttttggttttttgtttattgatgatttaggaattttgtaagaggagttgggttttattttgtgttgtattgtattagatggattttggtggggatagatgtttagtgatagtgtggttaagttttttttaggattttgggtttgtatttatgattatgtatagatggttattttttttgtttgtagtttttttttgtggtttgtttttagttttttagtttaatagagttttttagtggaaagttttttttttggagattttttttttgttgaaatataagtttttggaataagataaaattgtttaatttgtaaaagttataaagttgttttagaataaaaaaaaagttttgatttttggttggaaggagtggttttttatgttttagtggttagttattattttatgatttatgttggttttgttgataaattttttagtatttttttaggggaaggttatagtttttagggagggtgggagagtatttaggtttttgtttataaattagattggagttagatattgttgagggagggataagagggtaggttttggggtttttaagttttttttggggttggtagattattgtggatttattagggtaggattatttttttttataaattttttttgggtagttgtagggtagtttgagttggatatgttttatatgttagtttagtggggtatgaggtatttatagttatgtttggaagttagtgggttggtatttgttgggtaggtttttgttatataggtatagtgttttttttatggtttttttttaggttagagtatgtttggggattagagtagtttttgtagtggtttgtagtttgataatgtggtgtgagttatgttttgtagagaagaagagttttttagtgagggaagaggtgtttataaaatttaggatatgtgtagaaatttgtaggaggtgggggtgttgtttaggggttgtgttgtttttattttttattttgtagatgatggaattgtggtttagagttgttaagtggtttgtttaaggttatttagtagggataggaaggaagttatttttttagggattgtgtgggagtttagtgataattaaagattagtgttaaagtttgtttaggatgagaattttattaagggaaatagttttgggattgttgtgtttatttggaaggtagttagtttataattgagtttttaaaaatgtatgtttttttatatgaaaatatatttgaatgggattttgtagaaagtattttttattaaggtatagtttgaggggaggtttttgttttatttttggttgtgttgtttttagttaagggtagtagggattagagtggtttttggggtatagtattggttgtttttaaagagtgttttgtttagtttatgaaaagtttgtgttttgtgagtttgggagggtgttattatttttagttttttagggagtattatttttaaatttatgtttttttgtttagtttttagattttttgttggttatttatttgggttttggttagattatttataaagtgaaggttgaatttgaggttttttgaggtttttgttagttaggtgggtggagtgatgtttttttggggttggtggtttaggaggtaggggatttattgtggtttgtttaggttgtttggtggggtggttattttgaggatggttttattgtgtaagtttgatgaaggttttttttagtgttttttgttttgtggtttttgttgggtggagagtaggatgttgggttttatatttatttgttttagtgggtttgagtttttgagtttaaatagataagatgtagttttattgttatttaagttttttgttgttttttttggtttttttttgaggtttgtttgttgtgtttgattgggtgtgtttagtggtataatatatatttgttttattagttttaatgtgataattaagatgtggttttgaggttgggtgttgtggtttatgtttgtaattttagtattttgggaggttgaggtgggtggattatgagattaggagattgagattattttggttgatatggtgaaattttatttttattaaaaatataaaaaaatatggtgggtgtttatagttttagttgtttgggaggttgaggtaggagaatggtatgaattagggaggtggagtttgtagtgagttgagattgtgttattgtattttagtttgggtaatagagttagattttgttttaaagaaaaaaaaaaaaaaagatgtggttttgggagtagtggtggaggggattatatgttttagagaggagttattgagatgggttttttttttttaggttttttagggattttttaatatatatatagtggtaattaatagattagggtttaaggtatgtaggggttgatatttttagtgattttttgttttatggtttgtaggttattttagaatatttaaagtttggagtttggtttagttattttatgttttttagtgttgggtttagagggtggtatgagtggtagaaattgttattattgttaattattgatgatggtgttggttatgtgagatggtagttatggtattgtatgtgagtgaagggattaaggaggttgggtttgggagggagggtttggaaagttggggtgaattaaaggtaggggagttttttttttttttatttgtttgtttatgttttgatgggtttgtgtttgtggtaagggggttgttagtgtgaatggatatatgtatatatatgtatatatatgtgtatatatatgttaggtttttttgagtgttgggagtttttttttttataattaattgttaggaaggtatagaaatgttattttaggtaggagattgaggtagttttgaagatagattttggttggaagtaaaaaataaattatatagtggataaattaattattagttaggtttaagtgttgttgttttagatttgagttaggggggtaggttttttatatttttttaaggttttggtgttaatagttttagtattgatagtggttatgatatgtaagaatggtatattggaaaatgaaagggaagtagttaggagagaggagagttgagtttaaataaaagttagatttaggagagtttagtttttgagatggagtttattttatgagtttggaattgttaaaaagaaaagaaatatttttgtgaaaaatgagtaaaagtgttttttgtatgtttatttttttaggtataaataaagttttgagtttagggtagtggggggtggttgatggggagggggttgtttgtgtatttgagatttggtttttttttatttttatggatatatttagtagtggtgggagttttggtgttttgtttagaggtggtttttttttttttatttttgttgtttttttttttttagttttttttttttttttttttttttttaaaaatattttttgtttggtttaatttttttaatttgttgtaattatgaatgtatttgaattattatatttttatgtgttgattatatgtttgtgttttaaattgaagtagtattgtttttttaaaatgggaggaaaaagggagtaaaggagagaaatttaaaaataggaggtaggagagagggtttgaagtgggttttgaggagtttggtagattattgggtttgtttgtgagagttttagagttttggttgtttggtttggttggtggttgtagaggttttgagtgtggtttttggtagttttttttttttattttttttagtttttgttgttttgaggtttgttgtttttttttaatatttatttggagatgtttaatttagatttttggaaattaatttatagagttaaatttttgatgatttttaaagttttttattttttttgttttgtgatgttatgatttttttgggtttaagggtttaaaaagtttagtttttgtgtgtttgttttgtttttttttgttttgggttggttttagtttttttttattttgtattttaatgtggttgggtaggaggaatggttgtgttttaggttagtgtgttgagaaaaggttttggagtatttgtttaggaggaattttgagaagttatttttttttgttttattagtttgtagtgatagaggtagttgttgtttttgtttaggtagagagggtgaatgggatggggattttttggaagatttttattatatatgtatgagttagtgagtttttagttgttttttgggagggagtgagtttttttttttgggaatttggggttttattgggggattagtgttgttttttattgtttatttggggtttttagaggttgtttatttatttggggggtttttattagtatatggttagggtttatgttgaggttaagggtttagtagagtaggtgggggtttataatgtgggtttttggggtgggaattaggggtattttttttgtttttaagttttattttaagggtttatttaaatttgagatatggaggttggttttgttggtttaagtttgtttaaagagaatgtgtgtttgtgttaaggttgagaatttaggtaatttttttgaaaattttagattgttagtttttgttgagaaagggaggatgtgtggttgtattatggaagtttttttgtttggttgtatagggttggtataagatagttttgttttttagataaaatattttttagtttgtgttgttttttaaggtttttaataaatttataatatttgtatttttttattttgatatattttgtaggtttttgagtttataatttttgttttatagagttaggtgagttatttgtgattaggtgaggtttatgtatagtttttggttagatgatagagttaaaggttttgaagtgttattttaggttatagttttgtttgttttttgtttgggataggattttaaatgtaatttttttggtagaaaggatatttttttggggggtggggaggattatttttagttttttgggagatattaagtaattatttttttttaaagagtttggaggatagttttataggtagttagatagtgagggaggtggggatagtattttagttgaggtgggaggttggggaggaagggagggattatagttatgagagaaggttgaataatggttttagggatagtatgttttaatttttagatttgtaaatgggattttgtttggaataagagtttttgtatttgtgatttagttgtagattttgttgtggtgagagtattttggatggtttaggtggtttttaaaggtagttttggtgtttatataagatgggggtagagggagatttgatatagatagggatggttaagtggagatggggtttggagagatttgtagatgttggtgttgaaggtaagggttatgtagttataagttaagggatatttatagttattagaggtttaaaggggtaggtgatgaaggtagtggtttttaatttttttggtatttgggattggttttagggaagataatttttttatagattagggagtggggagatggttttgagatgatttaagtgtattatatttattattttattttattttattttattgagatagagttttgttttgttatttaggttggagtatagtggtattattttagtttattgtaatttttgttatttgggtttaagtaatttttttgttttagttttttaagaagttgggattatagatgtttgttattgtgtttggttaatttttgtatttttagtagaaatggggttttattatattggttaggttgattttgaatttttgattttgtgatttgttagttttggttttttaaagtgttgggattataggtataagttattgtgtttggtttttattttttattttttgagatagagttttattttgggattataggtgtgagttattgtatttggttataagtatgttgtattgattgtgtattttatttttattattattataatatataatgagataattatataatttattataatgtagaattagttggagttttgagtttatttttttgtaattagatggttttatttggtggtgatgggagatggtgatagattattaggtattagatttttataagaagtatgtaatttagattttttatatgtgttgtttataatatggtttatttttttataagaatttaatgttatggttgattagataggaggtagagtttgggtagtaatgtgagtaatggggagtgattgtaaatatagatgaagttttgtttgtttgttagttatttattttttgttgtgtaggttagtttttaataggatatatggggttgggaatttttgttttagagtttttagagggttatgtttagtggatattttgattttagtttggtgattttgattttggatgtgtggtttgtagagttgtgagaggatggttgggtgttgttgtgatttagttagtttgtggttatttgttatagtagttgtaggaaattgatgtagtgttatagatggagttagggtttagtttattggagttgttttttgttattttatttttttttaaaatattgtgttaagttaattattaataattattgattttgatgggtaggaattgtagaggttttttggtttgtttttttaattttttttttaattttgaaataatattttttgttggtttttttgattataaatgtaatatttttttttgtattgagtttagaaataagagaaaaagtaaaaagtagaaattttagttgggtaaggtggtatgtgtttgtaattttagtattttgggaggttgtggtggaaggattgtttgaagttaggagtttgaggttgttgtgagttataattgtattattgtattttggttgggtaaaaagagtgagattttgttttaaattaaaaaaaaaaaaaaagaagaggaagaaaatttattaattttatttgagattttttatatgaatttttgttgtggggtagggaagtttaggaaggttttatgaggttttgatttagtttggttggtggtgggaatttgggaatagttttgagtgaggggttgggttatgattgagtttatttatttagttattttttgtatgttgtgtatattatgggtttgatggttagggttggagtatttgttgagtatagttttgatttttagttttatttagtatggtttggtttgaggtttattttttttttgtgtttgaaaatttaaatattttggtttaggtgggggattatttgaaatggaaaatttggtagtattgattggttttgaagaggtaggagttagttatgagttggttgggaggtgagtgtagaggtggtgaggtaaggttagtagagggtgggggaggtgagggttaattttttattgtgtatggtgtaagtattaagggggtattttattaggttagtgtagatttaggtttttgtggtggattttttgtggtttttttttttagaggaatattgaagaggtttttgtggttttgttttagatttagaggtatatttgtatattaaatgtattgagtaattttatagtgagggagttgggtttggtttaatttatttttttttaaattggattaaaggttgttgttttaggaaggtagggtttttaggtttatggttttgggaaattttggttgtgttagtttatgagtttagtttttagttattttagtttgtttatattttggagtgggtattgttatttaaaagttttttttagatagtttttagggtggtatttttgttttttattttttatagatttttggttatttttttgtgatattagtattattggtttatagttttttttaattgtaaagtggggtttagtggtataggttgggtttggtagggtgggaaggaagagtgaaggttattttgtttttaatagtattggttgggttttggaaaggttggaatttatagataggaaggaagtgttatatttatttaatttgttttgtgttagttagggggtattttgtagaaagaagttaggtggttgtggttgggtgtagtggtttatgtttgtaattttagtattttgggaggttgaggtaggtggattataaggttaggggttttagattagtttgattaatatggtgaaattttgtttttattaaaaatataaaaattagttgggtatggtggtgtatgtttgtaattttagttatttagaaggttgaggtaggagaattgtttgaatttgggaggtggaggttgtagtgagtttagattatgttattgtattttagtttgggtgatagtgtgagattttattttaaaaaaaaaaaaaagaagttaggtggttattttttagtttttggtttggtttaggaattgttttttttttaagatgttattaaatgttttttttattaggaagttttttttggttgttttttttatttttgtttttgttttagaatatggtttggtttttatggataattttgatattagagtttaatagagatttttttttttatggaaatttatattttaaattgaatatgtgtgtaggataagtttttgtttttatgtgaaataaaagtgaaaggtgtggattatttgtttttttttatttttttttataataatttgggttttataggggtttagtaggagttaggtttagtttagttgttttaggtgtattattttgggtattagtgtttttgtttttttttatgaagtatagttttattttttggtatttagtggggaggggatatatattaggtattttttagggtggattgtgttttttatattaggttaggaggttttggggttggtttagttatttagaaaagggagtaggtggtttaggtgatattgatgtgggtagtaggggtttttgggaaagggtttttgtaggattggttttattttgttttaggagtatatattggggaagggtgttgtgtggaggtggagagaatgtatttttggttgaaagtatgttttttgatgttttgggtttggatttgttgttattttttatgtttttttatttaatatatgttttagtaaattttttatgttgatgagtgttaagttatagaggatgtataattttttgttttaaaaagtgattttttttgttgggtgtggtggtttatatttgtaattttaatattttgggaggttaaagtgggaggattatttgaggttaagagtttaagattagtttgggtaatatagagaaattttatttttataaaaaaaaaaaaaaaaaaaaaaagtttaggtatagtggtttatgtttgtaattttagttatttgggaggttgaggtaggagaattatttgaatttgggaggtagagattgtagtgagttaagattatgttattgtattttagtttgggtaatagagtaagattttattttaaaaaaaaaaaaaatttttttttttgaaatagggttttattttttttgtttaggttggaggatagtgatgtgattataatttattgtagttttagttttttgggtagttggaattatagggttgtattattatgtttagttaattttttgtatttttagttaagatggggttttgttatgttgtttaggttggtttggagtatttgagtttaagtgatttttttattttggttttaaaagtattgggattataggtatgggttattatgtttagtttgaaaatattttttttaagaattagttagttatggtggtgtataattgtagttttagttatttaggaggttaaggtaggaggattttttgagtttggtaggttgaggttgtagtgagttataattgtgttattgtattttagtttgggggatagagaaagattttgtttagaaagaaaaaagaaaaaaaaaagatttttttatttattttttgtttatttttagatttaattattgaagtttgtttttttgaattaaaaatgaaggagttttgttttggatttttttttgttgattttgttattgtatttgttagtagagttagttaagattttttaggttggttttagtttggtttgtttatagttttttaagtaagatggatttttaggttgaggttagttgtatttttttttggaatttttttttattttttattgtgttttagattttggttgtttttaaataaatataatttagttatttttgtttttggggttgttgtagggtttattggtgtaaattgtttgggtaggtttgttgttttaggagtttttttaggttagtgtggaaggaaattaagataatggggagaagtagtttggttgggtttaattttatttttatatgtttgtgtttagttaattatttgggttgtagtttgataggagttggagttggtgttttatttttagagggggtttttgattgtttttgtagagtgagggaggtttgggggtgtagaggttaagggtttttgtagagtttgttttaggttttttgagtttaagtttttttgtagttaatggaagatttttttgagagtgggtgttttttattttgtttgtttagtaggtgtttagtaattgtttattggataaataatgaatttgtggatttaatgtgaagatgatttaaattagtgtttttttatagaattttttgtaatgatgttaatgttttgtatttgttgtagttaatatggtagttatatgtggtagtgaatgtttgtaatgtggaagggttattaaggtaaagagttttgtatttatgttataatttaaatttaaatagttataaatgtttagtgtgtgttttgttatatagattttttttgttattttttttttttttttagagatattgtatttgttattaattttttatttgggaggtaaatggagaaatgttattttttagttaatgtaaaagaaggttaatatttgtattttaagttagttttttgggtaatttttttaagtattttttattaaggttagtttagtaatattttttgattgtttgttatgtattaggaaagtattttgttgtggttttggtttgaggttatggaggatatagaaataattaaggttaagttgatagaaggggtgtgataagatggtttaaagttattgagttagttaggaggtttaggagtatggaagttttgttttttagaggataagtggtaatttatttagggggggtttgagtatttagagttaggagtgtagaagtagggggttttaggttggaaagtggtattagggttaggttgggtggtagtatgaatttatttttgaggttttgggggtggaaattaagggttttatgagtaagaagatttggtttaggtttaatggaaatgattgggtggagggattttattatttggtttttagtatatagggagggaagtggtaattgttttttaaatgttggttgtggaggggaaggagttatagtagggtaggggtggggaggatggtatttgttggtttaaggagggatgatggaggtttaattaagatatgattgtgattggggtagtttgtttaagggttagtatgtagagggtgagttgatgagattttggtagtttgttgagatttgggggtgttggggaggtagaggttaaggttaattttgagattttttgtttgtaaatttgggtgggtggtaaggttgatattagagaaatagaggaagagtgggtagttatgggtgagagaggaagtaatgaattaggggtgtttgtaagagtttaggggtaaggtttttgggtagttaagatgttggtggttttttttatgattagttttttttatgtggtatatttttgtttgtatggttgggtatggggtatttgtttgtttgatatattttgagtagttattttgtgtattgaggtaatgtggtatggtgttttggggaaatagtgaggaggtattgtataggttttatttttttggtattttttgttttttggggatggtggtagttaaataagtgatagttaattgttaggagagtttggttttgatttattaggtggagttaggtatttttgttggaagaggtatgggaattagtataggatgaagggaggtagtgagtattagtttaggttttgtttttatagggttttttttttatatttatttgtgtaggtgttttttgtgagggtagagatatttgtagtgtttgagggagattttttgtgggtggggttgtttatttatagtggttaggtgggaggtgtattagtgttttgtggttgttataatggattatagttgtggggtttgaaaaaatggaagtgggtttttttttatgttggaggttagaggtttaaaattaaggtgttagtaaggttatattttttagggaggttttggggtggggtggggggggggtttttttttgtttttttttagatgttttttggtttggggttgtgttattttattatttgtttttgtttttatgtggttttttttggtgtgtttgtggtttttttgttttttttaaggatattagttgttggatttagggtttattttaatttagaatgattttattttaagatttttaattatttatatttgtaaagattttatttttaatttttaggttatattttgaggtttttggtggatatgagtttgtgggggatatggtttaatttaggatagaagggatgatgggggtattggggaaaaggttatatattttagaggtattggaagatggaagagtaggatttagtgatatgggatgttaggtagaggagttggttttaaggattttagttggggtttgagggttagagggagggaagtttaggtattattgagatgaaatgttttgtgtattgtgggaaatagggtaaaagtttgttggatgtttagttagagaggtggttgtttgaggtatagaaaatgagtgaatatgggagagtttattagaaggttatttgggagggtgtggtggtaatatttagaagggttgagaagtgtatttttatagtttagttaaatttatttggggaaatatatgtttttggtagtattagtaatagagaagatttttggtgatgttattagtgggttatgggatgggtaaattttgtttttttatatagaggaatatttgttagttgttaaaataagtgaattaaggttttgtggatttatatggataagtttttatgttgttatgttgtgggtataggtagggtagttattgattttagtgaggtattaaggatgtgatgttgatgatggtatttaagaggagatagatttaggttgtttagttatatgatgttgatgattgtatgtaagaggagattaggttggatgtggtggtttatatttataattttagtattttgggaggttaaggtaggtggattatttgaggttaggggtatgagattagtttgattaatatggtgaaattttgtgtttattaaaaatataaaaaaaattagttagatatggtggtgggtgtttgtaattttggttattgaggaggttgaggtagaagaattgtttgaatttaggaggtagaggttgtagtgagttgagatggtgttattgtattttagtttgggtgatagagtgagattttattttaaaaaaaaaaaaaaggagatttaggttttttagatatattattgtttagtatagatgtgtttgtttggggttagattttaatttagaggggtgggtattgtagtaggagtggggttaggatggagaaggttatttagggttgtggttatatttgtaatgttttattttttaagtgggatggtgagtatataggtgttttattattttattttttatatttttgttttgtagttttaagaattttattttttttttaaaaggaaagaaagtgtgtgagttgattaaagtgttgattatggtgttatttaagtttttgttagaaatgttatttttggtttagttttaaatataattttgagaagagtttttgtttttttggggagggtaagagttttagatataggagattggttagatgtggatttatagagaagttgggttgggaggatgggatggtagatagttgtttggggagtgttaaatggggaggttggagatgttggggtgtttaggaatgaatttttgtttggattagggttttagtaaaagggaggtagggagaaagaaagaagttaagaagatgaggaaagggtgttttgggttagagtttatagaggtttatagagggaggattttgtgtgttagtaggtagttttatgtaaatttagattattagtttgtagttttgggatttagtaaattatgttttaggtttttaagttgagttgtgattgtggttgttaagtgttgatagtatagaattagttagtttgagtagagggaagtaattgttgggggaggttgtgtttatgtagtttagggtgttaggtttttaagatgtaatttttataagaattgggggattttttttatttattttattagaagttggttaatgagagggaaggagatggagaggtagattagatgtggagttggagaaaagttttttagaaatatagtagtggttgggttgtttagtggttagtgtttaatatgattgtgatgggtggagttttttttaattatagtgttgaattatgtagttgtttaggggtttttagttagagtattatttttttttttttatatatagttttattttgtattgtaaggggttttatatgtatttaatgtggatatggtattttttttatttttattttttgtaaaaagttattttttttattgtttaggtttggtggtgtatagtttatgggtattgtatttatttttggaaggtagatttaggaggtgtttgtgttgtttttatagaagtaagtttaggattagaagtaggttttgggtttagaattttgaggttttaggtgttagtgtggtttggaattgtttagttttatagttattagttatatgtagatataagtggaaatttatttaaaataaataaataattttatgtaagtaaatgagtgaataaagtaaatgtaaatatttatattttgagtgtgtaatagatttaggtggttaagtggttattatataggatggtggagtgtagatgtatagaatagatttattattatagaaggttttattagatggagttggtttagagtatggaggtggtggttttagatgggtatatgtttttgtttttgtaggtgttttgttttggtaggatggttgttttattttgttttgaaggtagttttggtttataggtgttttatttgtgtggatttgattttgggtttgtgttttttggtaattttgttttttttagaatggttaatttatgaaggtatagtttttgtttgtttgttattatgatggtagttaggggtttggtatttagttggtttttagtatatatgtataggtgattatgttatttttgttttttttagagttttttgttttttaggggaggtaagtttatttattgttgtgatttattattttttttaaatagaaaagttattagatgggtatttgttttagtttggttgttggaagtgatagttaagaataatgtaggtttttagaaatagaggtattagtatggttatattggggttaggtaggggagattagggatatttagtggggagaagatgatgtgtagatttagttttggggggtaagggttggaggtagagttttgatttttttgttttatttttttgtttaggttgtatttagtgttggtagagtttttttaagtttataagttgtaatttgtgttttggatggttagttttagagttttgatgggtgtatttgttttttttttttattggttagtgtggaaaatttttaaatatatggaaaaagtataaggagtagtatagtgattattgttagaggtttatttatttttttttagataatattggatgtatttgttttattttggagtattttttattttgtaaggttgtagggagtttatagatattgaattaatattgagaggtttatggttaaagttatttgtttatggtatatttgtttttttagtattttaaattaaattatttagttttatttattttttgtttttttttttgttttgtatatatgggtttgttttttgagtttgggggtggttgtttttgtttttataaggattatttttagtagggtagtgttgataggtttggaagttatttgagtttaaagttgttaaagattgtgtttttttgggaaatgggtaagtggttttatttatttagggaagttaggtggggaggtaggttttagattagaatgaagggattttagtataaatatatttatgagttgggtggggttagagtggagtgagttatttatttgggttattggagttattaagtttttggagttggttattggaggtttgtgtgttttttaaagatagagataaagggtaaaggttatataaggttattggtgttttttttttgggtggatgattaatattaggaatgtttttgtttttgtttttgttgtgagttttagagttagaaatggggtttatttggggatagaggttttatttttttaggtaattttggatgttggagggatgatagttattgttgtttggttgttggaggggttttgggttaaatttttatatatatttttttttaagttttattatttttgttttgtagataaggaatttgagtttttatagagtgttatttttttgtggttatatagtgaatgagagttgtatataggtgagtttatgtttattagattttaagttgggttgtatttaagtgtgtttttgttggatggagtttttttttttttttatgtttatttgttttatgaattagggtttttttatattagggtttataatttatgggtagttttgatttagttttttttatttttagggttgggtgtagttgggttggatttggggatggagtgggataggttatttttattttttgttttaggagggaataaaaatagaattttagattaatgtagttttttgtggtatgtgttttttttgtttatatataggttttggtttggggttgtttgttggagaggtttatggtaggtaagttttaatttgaggagatttgttgaggtgttaagttaagtaaatttgaaaggttgttaggaggagtggttttgggagtataggtggttattttattgttgtagagtatggtattttggggatgttttttgggtaatgttatatagttattttttagagagttttagggatatataattagtttagttttattaatagtgagataagggattaggtagatttagatatttttttgtatttgattattatgttggttgttggttaaagatgttagtttttttttggaattttttagaaaggtttttgtagtatttatttatttatttatttatttatttattttatttatttatttatttatttatttatttatggattttatttattttattatttttttatatatttatttatttatttatttaatttatttatttagttttttatttatttatttatttattaatttatttatttgtttatttaatttatttatttattaatttatttatttattatttatttatttatttatttatttatttatttttttatttatttatttatttttttttttatttattttataattttatttttaaattgtgattagatggaaatgggtgtagttagtttgtttttaaaggtttagagtggaggtagagtgaattgtttatttggtttttgtgtttagtagtttaggtttgtatatatgttttataattataggatattagatttagtaattggtagtagaatgagtatagtgtattttttgtggaattagtattgatagggtatttatttttattaagtttgagtttttttggtgttggagggaatttttagatgggttttaattttagttgaatttattttttagggaaagtaatattgtgagaaatgtgtgtgatataaggttttaaagagggtgtgggttgtgatttttggagtaattagggaggttttatggaggagatgaggataaagttgagttttgaaggagggattggaggatgttgagtagggatatttatttttgtttgtgagggtttgatggtaggttgtgagttgtattttagttttgatttatttaatttataattttagtaggtaggtgtttttgttttattttatagaggaggaagtgaggtttagggttgggtaaattgtttaaggttgtatagttgtggaatttatttttagtatttttagtttgttttagttatgtttgtgattttatttagtattttttttttggtgtttatttattttgtttattgttaagtaataaaaattttattaggaaaatttaggggtttttggttagtttttttagatagaaaggtagattttggtgtagatttttaggaagtaaggatggaagggttagtatttgttttttagaaatgatagtttttttaagattaggagagatggtttagagtgtagttttggtgggttgtttaggattaggaggggagaggagtggggaggaggatgaattttatttttaaggttgttgagtggtatatagtgagtttggattttttagttttagttgagtttatttttatgatggttatgagtattttttttatatatttgattggaagttgtattgtatataatgtatatggggttattattttttgttttatatatttttatgtatatattattagtgtattattgggatattttgttgtttggggttgagagtgaattagaattttgtttataaatttagtatattttattgtggaaataatggggggtaaggaggggttgtttagtaaagaataggatatatgtttttgaggatggagttatttttggttgagatatttttgtaggggatgttggtgataaaggttgttttatttttttttttgggttagatggatattatttttgttttttgttttttagtattaggtaaaaggaaaatagaagaggttttatttaggttaaatattttagggttttttatttgtaggaaatatgttggtttattttttttaaatttagtatgggggtggagaaatggtggggaaaatagtatttgttttagattttttgggtggagtttttgttttatttatattgtttatttttttgattttttaaaatgggtatttggtgtttggtagtttttggtatagagaagatgtaaagtaaattgtttataagaagggggtgagtgtagtttgagtattttttgtttttgaataaattgttaggtttagtgtagttgttgttgttattgttgtttttaggaagggatttttggttatgagtggttttagtttagttttttggatttaattatttaggtttgtgtttgagtttagtaaagaggtagttagaaaagtttttaagatatttaatgattttgtggttttagttgagaagtgagttatttttatgtgattttaaaataaaatatatttagaaggagagaagataattgaaatttagttgtttggagttattttagatgaaagtatttgagtttttgggaggtaaaggaggtaggaaagtttggagttagatgattagaatttgaatgtagattttgttaggtttttgttgtgggttttgggagatgatttttattttttgagttttagtttttttggggatagagatggtgtttatttataggttgttttgagttaatgaggttatatggtgtaagtattagtatagtgtttggtataaaattaaaatttaataagtgatattattattattattattattattattatttttgagatggagttttgttttgttatttaggttggattgtagtggtatgattttagtttattgtaatttttgttttttaagtagttgagattataggtatttgttattatgttttggttaatttttgtatatttggtagagatagggttttattatgttggttaggttggttttgaattgattttaggtgatttgtttgttttagttttttaaagtgtttggattataggtgttagttattgttatttggttgtgatattattataatattaatattataatagttggttaggtatggtgatttatgtttgtaattttagtaatttgggaggttgatgtgggttagttatttgaggttagtttgagattagtttgattaatatagggaaattttatttttattaaaaatataaaaattagttgggtgtggtggtatttgtttgtaattttagttatttgggaggttaaggtaggagaattgtttgaatttaggagatggaggttgtagtgagttgagattatattattgtattttagtttgggtgatagagtaagattttgttttaaaaaataataataataaataaataaaatatattttgatgagatatggtaaaagatagtagaaggtaggagtttggggatttattatgggttggtgttttaagtagaaagaaatgtagtgtttataagttagagagtagatgttgaagataggagatgagtggggttttttggttttggagaggaaagggtgagtttaggtagaaagagtaaatttagggtgttttgtgtagtgttttttttgtggaattagtttagggtattagtagtatagtttttttttagtagtggagattaggttaattgtttagtgttttttttgtttttttgttttaattttattaagtatagtttttttttgggtatagtagttttgtaggggtggatattgatttatgtatttaggagtttagaggtttttttttttttatttatttatttagagatggagtttttttttgttgtttaggttggagtgtagtggtattaatttggtttattgtaatttttattttttaggtttaagtgatttttttgttttaattttttgtgtagttgggattataagtatgtattattatgtttggttaatttttgtatttttagtagagatggggttttattatgttggttaggttggttttgaatttttgattttgtgatttttttattttggttttttaaagtgttgggattatagatgtgagttattatgtttggttaggggttttttttaatggattttttttaatgtatataatttggggaatttagatataagaaagatatagagtatgaaggttttttattggtttgtttatttttagaggtggggttttaggtggtttaggttggttttaaatttttggttttaagtaatttttttgttttggttttatgttgggattataggtataagttattatgtttagttatttttttttttatttgggttgttatgttagaatttggtaagttataagatggaaatgtttaaataggtatttagaatttgagtagatattatttgatgtattattgttgttattttaatgattgaaatgtatttattatatttgtttttttaaaggttattttagatttttatagattttatttgtgatgtaagatagttattttaaatttttttgtgggtttgaatagattagatttttgaatttttgggtagagtagggatggggttgttttagaggagggtgatattgttatatttttgttttgtttttgtgttgataatgaatgaggtttggatagttttttttttattaaaagttatatttttttaaaaaggagttttttaggatgaggtgttatgataatttaattgtgtataaatatttatttttaataatgatagaagttatttatagaaaagaatttatttttggttgggtatggtggtttaggtttgtaattttagtattttgagaggttaaggtaggtaaattatttgaggtttggagtttgagattagtttgattaatatggtgaaattttgtttttaatgaaaatataaaattagtttgtatgtttgtaattttagttatttaggaagttgaggtagaagaagtatttgagtttgagaggtggaggttgtagtgagttgagattgtgttattgtattttagtttgggtgatagagtgaaatttttttttaaaatatatatatatatatatatatatatatatatatatatatatataaatttatttttatttttttttttgaaatttttgagagaggttaggtgtagtggtttatatttgtaattttagtagtttgggaggttgaggtgggaggatggtttgaggttaggagttggagattagtttgggtaatatagtaagattttatttttattaaaaaataataaaagtttaaaaagtttttgagatagtttttggggaaaggtgggttatggagatttttattttggttatttgtgttttttttgtttgtttttttgtggtttttttttattttgagtttggggtgggggtggtttgagtttaggatgggggtggtttgagtttggggtgggagtggtttgagtttgggatagggtggtttgagttggggtgggggtgttttaagtttgggttgtgggtattttgagtttggggtggggatgttttgagtttggggtgggggtgttttgagtttgggttgagggtggtttgagtttgtgttgggggtggtttgagttgggatgggggtggtttgagttgggatgggggtggtttgagtttggggtgggggtgttttgagtttgggatgggggtattttgagtttgggatgggggtgttttgagttgggatgggggtgttttgagtttgggatgggggtggtttgagttgggatgggggtggtttgagtttggggtgggggtggtttgagtttggggtgggggtgtttaggatgtataggttttattttttttttttgaggtttagtttgtttataggagttgtgaagggttggattaaagttaaaggtttaaattttagatttatttttagatttagtggataattaaaatatttaagtttatttttaaaggaagttgagataaggagataatggttattttttttttttttttttttttgtttttggtttttgttatttggagttgtgttttgaagaggtatattgggtattaggtttttttggttttgtttttattttttgtttagatatagaataatttttttttatttttaaggttgatatgtggggttgtggattaaagttaatttatttatttatgaggggagtaatttttttgttttaggaatttgtttttataggagaataaatattgtagaaggtattgtttttagtggtggtgtatgtttgtaattttagttatttaggaggttgaggtagaagaattgttagaatttaggaggtggaggttgtagtgagttaatattatgttattgtattttaatttgggtgaaaagattaagattttgttttaaaataaaaaaagaatagtattttgtgttaaggttaggggttttagttattttttttgtgaagtggaaggggtattattagtttttgtgagaaggaaatagtttatttaattataaaatgttaattaaaggaggtagtatattggttttggtgtggtgttgttggtttttgtttggggtaggaggagggttgggggagagttaaaagttaaagaaggtttatggaggttgttttttttttggtgattagttttttttttgatggtaagttgttaatagtatttggtttttaggttggggaaggtgagattagtttatatttgtttagggttttgttttgtttgtatgggtagtaggtgtttattttgttagatggttttgtttattatagggtattagtgttagttaaggatttatagagtttttttgtaaaggtttattagtgggtattgggattttgggttttatttatatagggtttttatataaaatataggatgtttagttaaatttggattttagataaataattaataattttttgaagagataaggattttgttgttttatttaagttggagtttagtggtatgattatggtttattgtaattttgaatttttggatttaagtaattttttaattgtagttttttaaagtattgggattgtaggtatgagttattaaggttagtaaataatgaattatttttaggtataagtatattttaagtttgttgtgggatatgtttatattaaaaattaatttttgtttatttgaaatttaaattgaatttattgttgggggagataatggagtgatggattgatagaggagtatagagatagtttttttaaatttttagttgattaaagtttggtttttagtttttttgggtttttagagatgtattaagggtggaagtgattaggagggagataaaaatattgaagtttgagtgttagtattgagttgtgtggttttggataggattgttttttttttgagttttagttttatatgttataattggttaataatagttataaagtatttgaagttaatggttgggagtttgttttaggaggtaggtattattaggatgtagagagagtgaggagtttttaaagttagtttaggttaggtatagtagtttatgtttgtaattttagtattttgagaggttgaggtgagagaattatttgagtttagaagtttaaggttgtagtgagttgtaattgtattgttgtattttaggttgaatgatagagtttttgtttttaaaataaaataaaataaaataaaataaaataataaagttagtttgtgtattggattgtatgttgttttaaagtatttaaagtgagagaggttaggaagtaatgagatgtagaaaggtagggggaggaggtttagaggtattagagaagatagttgatttttatttttatatatttttggggtattttgagttttatttatatatttaggtgagaatttttgtatttgtgaaagtaatttgaggttgagagaattaataggaaattgttttattttttatgtagggtttttttataaataaggttgagttgtagtttattattgtagttgagttttttgtagtagttgtggtggggaaggttttttaggaggtttgagtaatttagaaatatttatagtatattttttagtttttttagaggtttttgttgagatgaaagtgttttggtttgtggttaaagagtttagtatattgggtagttatagtttttattatattgatttggttattaggtttttatgaatttagtgaggggagatgggttttttagggaagtttgttgatttttttatattgttgtaaatgtaaagtttggtgattttattatttttagtaattgtgatgtagtaataataagaatagttatgtttattgtttattgaaggtatatgatgagttagatattgtgttggtatatgtgatttttggaggtaatatatttttttttaaggaggaaatgattgagttttggagggagggttttttatttggttttaggtttttttttgatttgtgtttttttttttttttttgtttgttttattgtagtttttttggtttttttgttgtttttggaatgtattaagtttgtttttagtttagtttttgtattgttggtttttttttgtttttttaattttaatttagttgttattatttttgtgattttttattatttattttaaagtagttattagttattttttatgtaattattttattttaatttttattatagtttttagttttattttgatagtttttagaattgatgaatttattgattttgtttttttttattgtatgtaaattttaagaaataagagtttttgtttgtttattgttgtgttttagtgtttgttatagtatttggtatgtagtaggtgtttaatgaatatatttttaaaagaatgaatgattggaaggagtttgaaagaatgatggtttgtgttaatagtttatttttaatttttttagatgggatggagattattattatgtaattatgatttttttgagtttgtgtggtggttgatggtaggtgttagtttggttggattaagggatggttggtaatgtattgtttttgggtgtgtttgtgagggtgtttttggaggagatgggtatgtgagttggtgggttgagtggtaaagatttttttttaatatggatgatattattttattgttagataataaaaaggtagagaaaaggtgaatttttttttttttttggaggtgggatgttttttttttttgtttttggatttagaatttttagttttttagtagttttttaggtttttaaatttttggttttaaattaagagttatattaatagttttttagttttgaggtttgtagatttggattgagttatgatattggtttttttgggtttttagtttgtggatggttttttgtggtatattttggtttttataatggtatgagttaatttttttaataaatttttttttatttatttattatttatttttttaattgtttatttgtttatttatttatttatttattatttattttttatttatttatttattatttatttaattaatgtatttatgtttgtttgtttattggttatttatatttatttattaattatttatttatttattatttatttgttatttatttagttatttatttatttatttatttattttttttttttttttgagatggagttttattttgttgtttaggttggagtgtagtggtgtgattttagtttattgtaatttttattttttaggtttaagtgatttttgtgttttagttttttgagtggttgggattatagatatgtattattatgtttagttaatttttttatttttagtagagatggggttttattttgttagttaggttggttttaaatttttggttttaagtgatttattggttttagtttattaatgtgttggttattataggtaagagttattgaatttaatttattatttgtttgtttgtttgtttgtttgtttgtgtttatttgtttgtttggttatttattatttatttatttatttgtttgtttgtttgtttgtttgtttgtgtttgtttgtttttatttttttgtttgtttgtttatttagttatttgtttgtttgtttgtttgtgtttgtttgtttttttttttttttgtttgtttgtttgtttatttagttatttatttatttatttattttttattggttgtttttttggagagttttggttgatgtagatggtgttttggtaagtttaggttgttatttagattattgtggagggagtgatttaaataatagatatgtattttttagtttgagaggtttaaagttttggattaaggtgttgttagggttagtttttggtgaggtttttttttttggtttgtatttatttttttgttgtgttttttgttattttttttttgtttataagtgaggggggaggagagatttttggtgtttttttttttttttataaggatattaattttattagattagggttttgttttatgattttatttaattttaattatttttttaaaagttttatttttaattatagttgtattgggagttagggttttaatgtaggaatttaaggggaagggtatagtttggtttataataaatgggaaattatgtttatgattaaattttttagaagatatggtttattagtgttgttaatgattgtaagtaaaggttagagaggaaaggggtttttgtggggtggggggtggtgggggtagttggtgttgggaataaggtttttttttttgtttaatagtagggaagtgaggttggttgtagatgttatttggggtgggaagagaggggagtttttgtttgtatattttgtgtgggttttggtttgatttttttttgtgttttttattttttgtgtttttttttgtgtgggagaaatgttgatttttgttggtttaggtgtttaggtttttaggtttgttggttttgggttgggtttaattaatgagaggtttgggaggaatttgggaggtggaagtaagggagggtgtgggagttttttattttttttgttttagatagtttttttagtaggagaggtggttttttgtgtagttttagtttttgttagagttttatttttgtttgggtttttagtaggtgattttggtttttggattttggttataggatttttttttttttatttttatttaggggtggtggtggtattttgttgttaatttttaggttatttttataatgttaagaattttttttttatttgtatggtttttttttaaggtattgagaagggttttaattatatgtttatagggttaaatattttttgtaaaatttataaaatggaaaatattttttttataattaattaatgtttttgtttatttttagttttgagtttttgtttgttatatttttttttgtgtgaggtggaaatggaggtttgttgttatgtgggggtttttgttaaggagaagttgaattggaaagatatttagtttggttttggttgggttatatttatgtagtttttatttatttttatgtatagtttagttattgtttgttattttggtgtggaaatggattttagtaatatttgttttatttattgttttaattttatttattgtgtagaattaaaaattataagatatgaatatattttgtggtgtttggtgttggaaaaatgtgtgtagtggagagaagtaagatttgaaatgtatgggtttagaagtaaatttgtggaaaattatttttattattagaggtgaagttgtaagtaaaggatttagtttttttaatgtggagttaaaatagaaaagtttttttggttagaaatatatgtataaatgttttatatgtagttagaaattttttttatttttttattttttttttgatgggaattatatttaaaaaaaaagaaaaaaataggatttattagaatttttgtgtattttgaataaaataattgtagtagtattattaattttatgttgattgttatttttgtatatattttaattattaaaaataaaaataaaatttgattaattaaggagatttatttgttttatttatttatttatttttgagatggagttttattttgttgtttaggttggagtgtaatggtatgattttggtttattgtaatttttgttttttgggtttaagttatttttttgttttagttttttaagtagttgggattataggtgtgtgttattatatttggttaattttttatgtttttggtagagatggggttttattatgttgattaggttggttttaaatttttgattttaagtgatttgtttattttaattttttatagtgttggaattataggtgtgagttattatgtttagtttatgtttttttttgttgttttttttttttttttgagatatggttttatttttttatttaggttggagtgtagtggtatgattatggtttattgtagttttgattttttgggtttaagtaatttttttattttagttttttaagtaattgggattataggtgtatgttattatgttttgttagtttttgtatttttagtagagatggggttttgttatgttgtttggattggttttgaatttttggttttaagtgatttatttgttttggttttttaaagtgttgggattataggtatgagttattgtgtttagtttgattagttttttgtttttgaaatagaaaatgatattataaagttattatattgaagaagtaatgttaaaaatgtgggagaaatagaattttggagatatgattgatagttgattggtatttttttgtatgtagtgatgtttgtgatatttaatagttgtttataatttataatttgttgttatttatttttttattttaaatgaattattgtatttatatttttagagggttgtataagtttatattattttgattttttgttgattgtttttttgttttttgtttggtttttattttttttattatttgtgtaattagttttttgtttttaagtttttttgttttaaatgtttaagtggattaggtattgtggtttttgtttgtaattttagtattttgggaggtttaggtaggaggattatataaatttaggagtataagattaatttgggtaatatagtaagattttgtttttatatatatataaaaaatataaaaattagtaaggtgtgatggtatatgtttgtagttttagtattttgggaggttgaggtaggaggattgtttgaggttgggagtttaggattagtttgggtaataaagtaagattttgtttttataaaaataaaagaaaaaattaggtaggtatatagtgtgtatttatagtttgagttatttgggaggttgagaagggaggattgtttgagtttaggagtttaaggttgttatgagttgtgattatattattgtattttagtttgtgtgatagagtgagattttgttttgggaaaaataaataaataaataaataaataaataaataaataaatgtttaagtggtttttattttttggttagattttattatatattttatgaataaattgtatgtatgagaaaggtgagtagatgaatagggtagggttagggggttaaggggaagattatagattatgtggagtgagattagtggttaaaaattgttaattatagttaggtttggtggtttatgaaggtaattttaatggttgggtttggtggtttatgtttgtaattttagtattttgggaggttgatgtgagtttattatttgaggttaagagtttgagattagtttggttaatgtagggaaattttgtttttattaaaaatattaaaattggttaggtatggtggtgggtgtttgtagttttagttatttgggaggttgaagtaggagaattggttgaatttgggaggtggaggttgtagtgagttgggattttattattgtattttagtttgggtgatagagtgagattttattttaaaaaatttaaaaaaaaaaaaataaaaaattgtagattttaataaggaagagttataggatgatattttaggatgtgggaaaaggttatgttagttttggattttttttgattaatgggtattttagttattaaaggggtagatgtgttttatttaatttttatttagttattagagtataatatagggatgtgttatagatagagatggagattaataggtagaggggtgatggggaggaagattgaggtaagaggaataaaatggggattgtagagggtaggtggtaggagtttgagggttttagaagaaattgttgtataagtaatgagttagtagggtgagtgatggttaggagaggtggtttaagaaaataaagagatatttttgggggtatagatgtgttttgaggggttgaggaagagatggggaaggggtggttttgtggatttttggtatgattgttgtggtgaaaaggaattaaagattttgataaggggatgattttttaaataaggaagttttgggtttttgtagggggattagtagattgagggtaaatggtattttgtttattaaagttttaataaaatgttaaggtaagaatatttgtttggttttgggggtaattttagaaatattagaaaagggatttattatgtgtaatttttttttaattatttggagaaatgtatggttatttaagatagagaaaggtagttaaagtaagtggaggttaggtatagtgatttatgtttgtatttttagtgttttgggaggttgaggtaggaggattgtttgaggttggaaatttagtattagtttaggtaataataaaataagattttgttgttataaaaataaaaataaaaattttttgagatggagttttattttttttgtttaggttggagtgttgtggtatgattttagtttattgtaatttttgttttttagatttaagtaatttttttgttttagttttttgagtagttgggattataggtatgtgttattatgtttagttaattttgtagttttagtagagatagggtttttttatgttggttaggttggttttgaatttttgatttttttggttttttaaagtgttaggattataggtatgagttattgtgtttggttgttataaaaattttttaaaaattagttaggtatgttaggtgtggtggtttttatttgtaattttagtattttgggaggttaaggtaggtggattatgaggttaggagtttgagattagtttgattaatatggtgaaattttgtttttattaaaaatataaaaattagttaggtgtggtggtatatgtttgtaattgtagttatttaggaggttgaggtaggagaattgttttaatttaggagttgggggttgtagtgagttgagattgtattatggtattttagtttgggtaatagagtaagattttgttttaaaaaaaaaaaaaaaaaaaaaattagttaggtatgtagtgtatatttgtagttttagttatttaggaggttgagaagggaggattaattgaaattgggaggttgagattgggaggttatgattatgttattgtattttaatttgggtaatatagtaagattttgtttaataataataataataaataatgtaagtgggtataagaatttatttatttatttatttatttatttatttatgagatagggttttattttgttgtttaggttggagtgtattggtgtaattttggtttattgtaagttttgttttttgggtttatgttatttttttgttttagttttttgagtagttgggattataggtgtttgttattgtatttagttaattttttgtatttttagtagagatggggttttattatggttttgattttttgattttgtgatttgtttgttttggttttttaaagtgttgggattataggtgtgagttattgtttttggttttaagaatttattttattttagtattttggaggttgaggtgagtggattatgaggttagaagattgagattattttggttaatatggtgaaattttgtttttattaaaaaaatataaaaaattagttgggtgtgggggtgggtgtttgtagttttagttatgtgggatgttgaggtaggagaatggtgtgaatttgggaggtggagtttgtagtgagtggagattgtgttattgtattttagtttgggtaatagagtgagattttattttaaaaaaaaaaaaaaaagaatttattttaagatagtaagttttagggttgaagttagtttttatttagttttaggtttaaagttataagtatggttattgtaatatttttatttaggatattattttttaggggtttagatttatattattaaggaggagtgtttatattagtagttggggagagggtggttttttataagatgtaatgtttattttgaagagttattatagtgataattatgaaatttatgtttgagatttaattttaagtgaaaagaatagaatttaatatttattttatggggagtataaaattttgaaaatatatgttttttataattaaattaaattttatgttatgtttttgaggagataagtattgaatggaatatagaagaaatgttatagttaatgattgttgaagttttttttttaattttttgtttatgttgtttggtaataagtaatatagaaaattgataataaaaagtaaaagagaaagaaaagatatagtgtatagtttagattgttttttttaaaaaattaaataataataataaaaagtataggttgggtgtggtggtttatgtttgtaattttagtattttgggaggttaaggtgggtggattatttgaggttgggagtttgagattagtttgattaatatggggatattttgtttgtattaaaaatataaaattagttgggtatggtgatgtaggtttgtaattttagttatttgggaggttgaggtaagagaattgtttgaatttgggaggtggaggttgtagtgagttgagattgtgtttttgtattttagtttgggtaataagagtgaaattttattttaaaaaaaaaaaaaaaaaagtataaatgtaagttgggtgtggtagtttatgtttgtaattttagtattttgggaggttggggtaggtggattatttgaggttaggagtttgaaattaatttggttaatatggtgaaattttatttttattaaaaatataaaaattagttaggtatggtggtgtgtgtttgtaattttagttatttaggaggttgaggtaggagaattgtttgaatttaggaggtagaggttgtagtgagttaagattgagttattatattttagtttgggtgatagagtgagattttgttttaaaaattaaattaaattaaattaaataaaataaaaaaaagaagtggtataatataaagttttggtagttaaagtgttaatttttagttattaggaaggttttgttatttaatgatttattgttttagttaaggttagttatattttgggtttttgatgttggaggtaatatgatgttaatattggtgagaaatttattatttttttttttttgttttttggtgttggtttttgtgtgtatttgtagtttttttattattggtgtttttatggtgtttatgttattggtttattttttagtaataatttgatagtttgatatttttgtagattttgtggttatagagttaaagttttttgttattagtgggttttgtagataattttttaaatttttttgggttgagttagttaagtttttaataagttggaagatgataggggttggatgtaatttatttttaattggtttgggttatatggatattattttttttttgggatttgatttgggatggaaataggagttatagtttatgggaaggttgtgaaaggaagttttggttttagggtgtggattaggttgatttgtggaataaggttttaggggtggtttatttgtttgttttgtttagttttttttggtaattatatttatttggggtttattttaaatttggtaggtaatgttgttgtttttattttagttgttgttttaatatgttttgtttggttaggataggtgtttaggtatggtatttagggatatttttggtttttggggtttaatttttggtttttaggtgtagtgttgggaaaagtagagggttttggttatggtgtaggttttgttataggttatttaagtagtttgggaggagttggaaagagagtaatgtatttatttggatagagattgaagttatatttttattgagaaaagatgatatttttgtttggattttttttttgaaattttaggttggggtggggtaggagttagtgagagagtttagtgttttaaaggggattttttggttttttgtgttttttaatttagtatttttggggatttatatatttagggtagagtggttatttagggttttttttatttagatataaaggttattgaaggttttgggttaatattgttttgaggatgattagtgatttgagtttttgttagagatagtaggtagtttgggtttaagggttgtttagtgatttgaagttgggattattttatattttttgtgttatttttgttttttgttttggaggtttttaggttgttaatagttatgttttggagaattaggttagattaggttgggaataaagtttagttgttatagagttgttgagaggttattggtaagtagtgtttaggagttgttttttttttgttagtaatagtttaatgtttttttttataggggttgtaaatgggtttatgtttagggtggggttagggagataaagtagagagaaattgggttgggagtagagagtgttatgttttattttggagatttaaggttaggttattttgtagagttggtgtttagagtttttagtgtataggagaggaggtaaatagaatttgatatttagtagtgtttggtagatgtttttggaatgaatgattaaatttatatggagagttgaaatgggttaggaattttagggagatgggtagtttatagtttagtagggttgttttagtagagtaggttaatgttaggttttttggtaaattttttggggtttaggtataattgttatattaggaaaggggtaggggtgattagtttattggttatgggggtattttattgtttttatagaagtttggtatttataggtttgggtgatatatgatttttatgtttggtattatgatggttgtttattaagtttttttatttattaggattgattttttttggttagtgattttagattattatgatttggtagttgttgttaggtttgtttggttaaggatttttttggagattgagttattttatatagtaaagtgagttatggggttatagtgttgtgtgttgtgtataagttttgagggttttatttagggattggtatttattgatttttataaatttttggtaattgtttagagttgggatgtttttaaggtaatagttttaataaatagaggtgtaggaatttagtgtgttattttttgttttattttaaaggtttatatttttaggggtttggagtttttttttggagttttttttattttaaagttagttggatttgtttaggaattgttattattattttttggttgggtttgtattgatgtgtattgaattttttttattaggtttattttaggtaaattttagagtttatgtaatattgtttgtggataaatattggggtggaaataggggttatttttaggttttagttatatggggttgttagggttgtttgggatggtaggagagtgttagaggagggtagtttaaggattaggtagggggtgggaagtgtttttttttatgggtttttaagtgagatgttttttgtaaatatttatttgggatttttaagtagagggttggtttttatgttatttggatttggattttagattattgtttttaagtggtaattttgggtttttttgtatttgttttggtttgagttggttatatttgtggggggtggttttaggaagaaggtggattgttgtaaatgtaatgttttgttgttaggtgtattgtttttggttattagaatttttttgggtaggttggggagatttgatgggtaagtgtttgtggtttggtgtgagtgggtagggtaggtggtttttgtttgggtatgtttttttatttttgtaatagattagggagagggttggttttaggatttaggtttagttagttgttttataattgaggggttttggtggaggatataagttagatagagttatagattaattgtatgaggtggttttttttttttagtttaggttttttgaatgtgttagagtagataagtttggatgtgaggaggtaagaggtagtgagaataggtgtggagatggggttgggggagaagaggaagaaattttgtgtttgtgttttttttatgtttgtttgttattgggttagttgattggggaagtgttttttgagggtgtaattttttgttttttttgtaagttagtttttggggtgttgggtgagggtgtagttttgtttattatggtgagttagtatattgaattatggtagaagttgttttttgtgtgggtgtagtttttttttttgtttaggatttagaagttatgatagtatagagttttttaattgtggttggtgtttttttaggaattttttgaaagttatagagaaattttagagtggttgggtatggtggtttatgtttgtgattttagtattttgggaggttgaggtgggtggattatttgaggtttggagtttgagattagtttggttagtatggtaaaattttatttttattaaaaaatataaaaattagttgggtatggtggtatatgtttgtaattttagttatttaggaggttgaggtatgagaattgtttgaatttgggaggtagaggttgtagtgaattgagattgtgttattgtattttagtttgggtaatagagtaagattttattttaaaaaaataaaaaataaaaaaagaatttttagagtaatttttaggtgttagtaggggtgtgatgtaattttagttttgtttttgtggtttattggttttgggtaagtttttttgttgttgttatttatagagagtttttaggggagtttgggaatgatggtaagttttatgtgatttagtatgtaaagggagttttaaaatttagaatttagagagttagggtgggtatagtgtagttggttttagtgttgaggggttgggggagagattttgtattatgttttgattatagtaagggaagattatggaggtttttggaatgttttagtaatggtgtaattttagttttttttatttttttgttaatgataattatgattatgatagtagttaataggttatagagtaggtattttttagtttttttaaatatgaatttgtttaatttttataataatatagtattgttttatttaataaatgaggtaggttgggtgtggtggtttatgtttgtaattatagtattttgggaggttaaggtaggtagattatgaggttaggagtttgagattagtttgattaatatggtgaaattttatttttagtaaaaatataaaaattagttgggtgtagtggtatgtttttataattttagttatttaggaggttgaggtaggagaattatttgaatttgggaggtggaggttgtagtaagttgagattatgttattgtattttagtttgggagatagagtgagattttgttttaaaaataaataaataaataaaattaaaaaatattatatatataaaaaaataaatgaggtaaatgagatgtatgaggtgagaattttgtgttatagggagaggtgtagtttggtgagatttaattttaaggggttggtggttttgagtttttaagtgtaattattggattatattgtttgtagattattattatttttattttattggaaggttgggtgaggtaattgggaaagtttggagtagtagtggagttgttagagagaatttgtttttagtgtttttttggattttgtagttgttttgtgtgggtttttgttgttttttgtattggaaaagatttttttatagatggggttttatgatgttatttaggttggagtgttgtgtttatttttaggtgttgttatagggttgtagttttgaatttttggttttaagtgatttttttgttttagttttttgagtagttttttgggtttaagtgatttttgtgttttagttttttgagtagttttttgggtttaagtgatttttgtgttttagttttttgagtagttgggattttaagtgtatttggttaagtttttttttattttttattatttaagatttttttttttttaaggtttagtttaattttatttttatttaaaatttttggggtatttttgtagtatttggaggttgaattgtttaggagggaagggtgttaatgagttggtgttttgtttttattttgatttttggtgagaatgtaagttttttgtaggtaaggattatattttattattatttttgtatttatttagatttggttatgtgtgtttagtatataaagtgtttttgatgattgtttatagatttatggtatttgagattgttttaatatatttttttaaaattttttttttttttagaggtttatgaatgtttaaattaggtttattgggaataatattatggttattttgtttattttgaagtttatatataggtttggaagtaataattttgtatagtttagatgaaaaaataaagatttttttgttgtttttggattgttagagttttgggggatttttaatattttttgttgttttttttaattttatggtgttgatggtttgttggggggttagtttgatttttgtgagtgtttgtatttggaaaagggttggtgttaagatagttttaggatatttagaatgagggtaagaggttatttttattattagttttttttagttttattttatataattgtaatatagtgatttagtatattttgggttattgttaagtagggagtaaattagaaatggtttgagttttttttttttttatttttagaggggtttgtttttttaggtaaatataaggaggtattgaggttgttgtataagagttggtttttgtttattttataaattttatttttatttattgtaaaaggttttgtttttttttttaaaaaaaaaaaaaaaaaagaaatttagtgaggggtggggtaggtgtgtgtggaggagaggagaaaaggataagtgatggtttttttattttttagtaagttgtaggtgtagagattttaagtttgttttagggtttttttggtatttgtgtaggagggtttttgtagaaaaaatttaggatttatgatttgggaggattttggttatttttattgtttggatttattagtgggaggtaaagtgtaagaaattaagggtaaagggttttttttgggtgggttagagattttttggaaagggttatgtattgtgtgatttttataataattttaagtatttggagtatgttggggaggaagttttggtgttaaaattaagtatgtgttatttggaagtttgtttttgtttattagtatattaatttatttatgtttttgatagagttgtgttttgggtgtgtagagggttattttgtttgtaataattgggtgaaagttgaaattttaagttattgatttagaagggtatttttggggaagttttgagtaattttttttgagataaggtattttattatttattttggtttttaaatatggaaagttagaggaaattgataatggtttaaaggtagggggatggttttgatgatttttttatttttaattaaggtttatgattttgtttttttattaataaaaattaatttatggatttttggtaggtatttttttatttgaatgaattaaaggagggatattaaataaatggtttttagatttagaagaggagatgttatttataatttgaggattgaggaggataaaggattttgtttgtttggattttttggagaaaattataaaggaaaaaaaaaaggaaggaaaagataaataatgaagatttggattttttttaatttgtttttgtggttttggtgtgtttatttgtgaaatggaattttagagtgttagagtgggagttttttatgaaatgaaagtttttgaattggtttatggtgaggtttaagttaggttttttttgtttatttaaggtgggttttgttagggtggagtgaggatgttagttgtgggtggtgttttgagtgtaaaatgtgaatttgagttgttaagtttgggtgttgttggatggttttatttggaggttgttttgtgttttattaagtagaggagaaattgaagagaatttgaagaaaggatgttgtggtttggattattagttttagaggttgaatttaaggatatttttttatttagttttgattttatttatttatatagatgtatagggatttaaagtatttggttgatttggaaagttagtgatttttgtgagggtgtaaggggtgaggaagagggagtgttttttagggtagtttttttgatatttgagtaagggttggagatagtgtaggggatggttggtttaggttgaaagtggtttgatagtggttttgttttgggaggaatttgatttgtagtgtgtttgttgtggggatttgtttagttttgggggtgttttgttatttttggttgtaggtatttaggtgagtagtgttggttttgggatattgatttttttttattttgggtgtgaagtttatttgagtaagatttttttatggtgtttttgtggttgttgtttttaggaaagtgtggtggtgaggtagtggggtgtgtgtttttagggtgttaattttgggttggtagtaggaaggtgggaagagggggtggtttgttgtttggagtgtattgattgggttttgttttggttttgtttttgttttgtttttttttggagatgtgtatagaattttggtttagttggttgtggttttgtttttgatttgttttttttttgttttgtgaatgtgtgtgttgagttttatttttgtttatttttgtgttgtgttgtatttggtggagtggggttggtgggtgttgggtttgggagggggtgtttttgtgtggtagtgtagattagattagattaggttaggttgggggtgggggttgtttgtgtggtttgttgtgtttgtagttttgtatttttagttttttgtgttggtgttaatggttggttttgggagttgttgtattttttagttttgagtttgggtggggtgggtttggttaggtggaagtgggtggaggtgtgggtgttttgggtggttttgttgggtgaggtggtggtgttgggtattgtggtggtgttgggtatagttgggggttggagttggggtgttggtttagtgggttggggtagggtgggataggatatttgttttgttatttttttggtaattaaaagggtagagtgtgttgattgagttggagttttagtttttttatttgtaaatgggtgtgttggatagatgattatttgttttttttgtgttgggtattgtgtgtagtttggtgtattggtgtagtggggtagatatagggagttgttttttataatttgggtaatgtaggtagtggtgagaggatgtaaaatttgtatggaagaattttttttatttggatatttttaaagtttttatgataaagtggtgtttttaatgtatagaggaagaagtgattaattatgattggagggtggtgttagagttttattgaggtgaaattaaaatagggttttaaggaatgagtaggaattagttaggtagttaaggtgatggaaggtagttgtttttgaaagagggaagggtgtggtggagtttgggaggtttgaggtattatagtgagtgtggagagatagaggtagggttgggtttttgtatagttgttaatggaggttgtagaggatgagaggaaggtgggaggttagttgggaagtgtttgttagttttgggtaggggtgtagtattgtttttttttgtagtttttttaaaaatgtataggaggttgaaagtgttattaatagttttgaaaaatttttttttttttttttttttttttattttttttgggggtttaagaagtatttttattttttgtttgagtgtgggaaatttatatgtatgagaatggaggtttatgtggtattgtgggtttgttttggtttatttgtttttttttttgagtaatttgtttagttatagttttgtagagggagtagtttagttagaggagtttttttttattttaggtagagttgattggattggagtggatattggattttaattgagtttatttttttttttatttgggggttagaggtttaggaggttttgggagggaagtgttgtaagggaggggagtagggagtatggatgaattgtgaatagtgttttggattttgggatgtttatattttaattgtaatttttatttatatgtttatttattgtttgtattagtattagtagattttggtttaggttgtgttttgatttggttagtaagtattatgatgatattgtttttagtttagttatgatgatattgttatgagtttaatgtttgggatttttaaagtttagtggtgttttaagaatttgggttatgggtgtattgttggttttgtttattttatttagtataagttagaggtgttttggagtatagttattttgaggatgttagttttggttgttttttggttttgggtaggtgggtttttttgtggatgtttatgtttttgtttggggttataatttataggaatttgggtatttaggatttaaggatatttgtgtggagtgatgttggatatattatatgggtgttttttgtgtgatggtttttggatatttgaattttttttttgattttaagaaattagaaagaaggataagagagagggagggaaggttgggaatgagggttttatatatttttgagatgtatgaagtttaatttgttatgaaattagagttaaaaaaaaaaaagaaaaattaaagagatgtatgaagtttaattgtttaagttttaaattttgtttttatttatttatttttattttttattttttgagagggagttttgtttttgttgttgaggttggagtgtaatggtgtgattttagtttattgtaatttttgttttttaggtttaagtgattttttagttttagttttttgagtagttgagattataggtgtttgttatatttggttaatttttttttttttgtaattttttttttttttagtagagatagggttttattatgttggttaggttggttttaaatttttaatttgaggtgatttttttgttttagttttttaaagtgttgggattataggtgtgagttattgtatttggtttatttatttatttatgagatagagtttttttttgttatttaggttagagtgtagtggtatgattttagtttattataatgtttattttttggatttaagtaatttttttgttttagttttttaagtagttgggattataggtatatgttattataattggttaatttttgtatttttagtagagatggggtttt

SEQ ID NO: 11 - DNA, 16 bp, Artificial Sequence
  chemically treated genomic DNA (Homo sapiens)
cgtcgcaacgcgtacg

SEQ ID NO: 12 - DNA, 20 bp, Artificial Sequence
  chemically treated genomic DNA (Homo sapiens)
cgcggtttcgattttaatgc

SEQ ID NO: 13 - DNA, 23 bp, Artificial Sequence
  chemically treated genomic DNA (Homo sapiens)
actccgacttaacccgacgatcg

SEQ ID NO: 14 - DNA, 23 bp, Artificial Sequence
  chemically treated genomic DNA (Homo sapiens)
acgaaattcctaacgcaaccgct

SEQ ID NO: 15 - DNA, 108 bp, Artificial Sequence
  chemically treated genomic DNA (Homo sapiens)
cgtcgcaacgcgtacgactcaaaacttaataactccgacttaacccgacgatcgcgacgaaattcctaacgcaaccgcttaaaacttcgcattaaaatcgaaaccgcg

SEQ ID NO: 16 - DNA, 26 bp, Artificial Sequence
  chemically treated genomic DNA (Homo sapiens)
gtagtagttagtttagtatttatttt

SEQ ID NO: 17 - DNA, 17 bp, Artificial Sequence
  chemically treated genomic DNA (Homo sapiens)
cccaccaaccatcatat

SEQ ID NO: 18 - DNA, 25 bp, Artificial Sequence
  chemically treated genomic DNA (Homo sapiens)
gttcgaaatgattttatttagttgc

SEQ ID NO: 19 - DNA, 17 bp, Artificial Sequence
  chemically treated genomic DNA (Homo sapiens)
cgttgatcgcggggttc

SEQ ID NO: 20 - DNA, 32 bp, Artificial Sequence
  chemically treated genomic DNA (Homo sapiens)
catcatatcaaaccccacaatcaacacacaac
